(19) United States
(12) Patent Application Publication
(10) Pub. No.: US 2026/0176622 A1
(43) Pub. Date: Jun. 25, 2026

(54) METHODS AND COMPOSITIONS FOR IMMUNE CELL CRISPR SCREENS

(71) Applicants: The General Hospital Corporation, Boston, MA (US); The Broad Institute, Inc., Cambridge, MA (US)

(72) Inventors: Marcela V. Maus, Lexington, MA (US); Robert Manguso, Boston, MA (US); Nelson Knudsen, Boston, MA (US)

(73) Assignees: The General Hospital Corporation, Boston, MA (US); The Broad Institute, Inc., Cambridge, MA (US)

(21) Appl. No.: 18/868,561

(22) PCT Filed: May 23, 2023
(86) PCT No.: PCT/US2023/067350

§ 371 Date: Nov. 22, 2024

Related U.S. Application Data
(60) Provisional application No. 63/344,951, filed on May 23, 2022.
(60) Provisional application No. 63/464,483, filed on May 5, 2023.

(51) Int. Cl. C12N 15/113; C07K 14/725

(52) U.S. Cl. CPC C12N 15/113; C07K 14/7051

(57) ABSTRACT

This application discloses in part methods and compositions for mutating immune cells (e.g., CAR-T cells) and determining mutated immune cell cancer killing efficacy in vivo.

### RELATED APPLICATIONS

[0001] This application is a national stage filing under 35 U.S.C. § 371 of international application number PCT/US2023/067350, filed May 23, 2023, which claims the benefit under 35 U.S.C. § 119 (e) to U.S. Provisional Application No. 63/344,951, filed May 23, 2022, entitled “Methods and Compositions for Immune Cell CRISPR Screen”, and to U.S. Provisional Application No. 63/464,483, filed May 5, 2023, entitled “Methods and Compositions for Immune Cell CRISPR Screen”, the entire contents of each of which are incorporated herein by reference.

### REFERENCE TO AN ELECTRONIC SEQUENCE LISTING

[0002] The contents of the electronic sequence listing (M105370033US02-SUBSEQ-ARM.xml; Size: 1,878,352 bytes; and Date of Creation: Dec. 19, 2024) are herein incorporated by reference in its entirety.

### BACKGROUND

[0003] Cancer therapy has been revolutionized by reprogramming immune cells to comprise chimeric antigen receptor (CARs), which direct the immune cell to the target cancer and induce killing of the cancer cell upon binding. CARs are transmembrane proteins that typically comprise an extracellular portion (e.g., antigen binding domain), a transmembrane domain, and an intracellular binding domain. The antigen binding domain is often, but not always, an antibody that binds to a cancer-associated antigen. Upon binding of the antigen binding domain, the intracellular domain activates the immune cell (e.g., T cell), which may result in the immune cell killing the cancer cells. However, numerous factors can influence the efficacy of a CAR based therapy in killing cancer, including idiosyncratic patient characteristics that result in one type of CAR based therapy having more therapeutic efficacy in some patients versus other patients. Thus, there is a general need for CAR therapeutics that can be personalized to patients in treating specific diseases.

### SUMMARY

[0004] In some aspects, the present disclosure describes methods and compositions for performing CAR-immune cell (e.g., CAR-T cell or CAR-NK cell) CRISPR screens (e.g., in humans) to identify immune cell genotypes that enhance CAR immune cancer efficacy. For example, this disclosure describes CRISPR guide RNA polynucleotide libraries designed to target genes that are believed to be involved in CAR-T cell efficacy. Thus, in some embodiments, the CRISPR guide RNA library may be used to produce a library of mutant CAR-T cells, the mutant CAR-T cell library comprising CAR-T cells with many different genotypes, and, e.g., comprising the same CAR. The disclosure is directed, in part, to the discovery of collections of genes the alteration of which may influence CAR-T cell efficacy (e.g., tumor killing and persistence), and the subsequent development of CRISPR guide RNA libraries to target the collections of genes. In some embodiments, one or more of the genotypes of the library of mutant CAR-T cells improves CAR-T cell efficacy (e.g., tumor killing and persistence). Further, these mutations may have different effects in different patients and/or when treating different cancers. In some embodiments, the methods described herein comprise generating a mutated CAR-immune cell library (e.g., mutated CAR-T cell library or a mutated CAR-NK cell library), administering the library to a patient (e.g., a human patient), collecting one or more samples of the CAR-T cell library from the patient, and sequencing the guide RNA polynucleotides of the CAR-T cells to identify which CAR-T gene mutants have increased most in prevalence in the samples as an indicator of CAR-T cell efficacy. In some embodiments, the method further comprises administering to the patient CAR-T cells comprising mutations that increase CAR-T cell prevalence in vivo (as determined using the method above). Thus, in some embodiments, these methods provide a strategy for identifying patient specific and/or cancer specific CAR-T cell genome mutations that enhance cancer killing efficacy in vivo.

[0005] The compositions and methods described herein provide advantages over previously existing technologies. Results obtained from experiments performed in model organisms are often not recapitulated when experiments are adapted and repeated in a different organism, e.g., in humans. For example, CD19-28z cytotoxic T cells eradicated B-Cell tumors in mice, but had little effect on cancer in humans. Brentjens et al., Nature medicine 9.3 (2003): 279-286 and Brentjens et al., Blood, The Journal of the American Society of Hematology 118.18 (2011): 4817-4828. In another example, a mesothelin directed CAR-T cell killed cancer in mice, but had little effect on cancer in humans. Carpenito et al., Proceedings of the National Academy of Sciences 106.9 (2009): 3360-3365 and Beatty et al., Gastroenterology 155.1 (2018): 29-32. The compositions and methods of the present disclosure are, in part, designed for use in humans. CAR-immune cell genotypes (e.g., CAR-T cell genotypes or CAR-NK cell genotypes) identified as improving cancer killing efficacy in humans require no adaptation from a potentially non-analogous model organism, and therapeutic effects observed can be directly applied to humans, e.g., the human in whom the screen was performed. The disclosure also provides CAR and CRISPR vectors designed for use in humans, e.g., comprising CAR incorporation markers and CRISPR mutation markers that are compatible for use in humans.

[0006] Further, the disclosure provides methods and compositions capable of providing conclusive screen results in human. The disclosure provides strategies for determining the characteristics (e.g., the size) of a guide RNA library that could be used in humans and achieve sufficient representation of the mutated CAR-immune cell library for calculations regarding phenotypes of interest, e.g., cancer killing efficacy (see, e.g., Example 2 below for calculation details). In some embodiments, the number of different gRNA polynucleotides in the gRNA library is determined based on these calculations. In some embodiments, a gRNA library designed for a human CAR-immune cell CRISPR screen (e.g., CAR-T cell screen or CAR-NK cell screen) is not genome-wide. Without wishing to be bound by theory, a genome-wide gRNA library may be too large and comprise too many different gRNA polynucleotides to provide conclusive results in humans, e.g., because genome-wide CRISPR libraries contain so many different mutant immune cells (e.g. mutant CAR-T cells) that they may not be adequately represented in a sample collected from the patient, resulting in poor statistical resolution and an inability to identify mutations that contribute to a phenotype, e.g., CAR-T cell efficacy.

[0007] This disclosure provides, in part, selected sets of genes to be targeted by guide RNAs of a CRISPR library suitable for use in humans, e.g., taking into account the expected limitation on guide RNA library size. In some embodiments, the genes selected comprise genes that are expected to influence CAR-T cell cancer killing efficacy or persistence and control genes that are not expected to influence CAR-T cell cancer killing efficacy.

[0008] In some aspects, this disclosure describes, a composition comprising a plurality of guide RNA (gRNA) polynucleotides, wherein at least 2 gRNA polynucleotides each comprise a homology region that is complementary to a sense strand or an antisense strand of a different gene encoded by a sequence of any one of SEQ ID NOs: 1-135 or a variant thereof.

[0009] In some embodiments, the composition comprises a plurality of guide RNA (gRNA) polynucleotides, wherein at least 10 gRNA polynucleotides each comprise a homology region that is complementary to a sense strand or an antisense strand of a different gene encoded by a sequence of any one of SEQ ID NOs: 1-135 or a variant thereof.

[0010] In some embodiments, the composition comprises a plurality of guide RNA (gRNA) polynucleotides, wherein at least 20 gRNA polynucleotides each comprise a homology region that is complementary to a sense strand or an antisense strand of a different gene encoded by a sequence of any one of SEQ ID NOs: 1-135 or a variant thereof.

[0011] In some embodiments, the composition comprises a plurality of guide RNA (gRNA) polynucleotides, wherein at least 50 gRNA polynucleotides each comprise a homology region that is complementary to a sense strand or an antisense strand of a different gene encoded by a sequence of any one of SEQ ID NOs: 1-135 or a variant thereof.

[0012] In some embodiments, the composition comprises a plurality of guide RNA (gRNA) polynucleotides, wherein at least 100 gRNA polynucleotides each comprise a homology region that is complementary to a sense strand or an antisense strand of a different gene encoded by a sequence of any one of SEQ ID NOs: 1-135 or a variant thereof.

[0013] In some embodiments, the composition comprises a plurality of guide RNA (gRNA) polynucleotides, wherein at least 135 gRNA polynucleotides each comprise a homology region that is complementary to a sense strand or an antisense strand of a different gene encoded by a sequence of any one of SEQ ID NOs: 1-135 or a variant thereof.

[0014] In some aspects, this application discloses a composition comprising a plurality of guide RNA (gRNA) polynucleotides, wherein at least 2 gRNA polynucleotides each comprise a homology region complementary to a different gene sequence of any one of SEQ ID NOs: 1-135 or a variant thereof.

[0015] In some embodiments, at least 10 gRNA polynucleotides each comprise a homology region complementary to a different gene sequence of any one of SEQ ID NOs: 1-135 or a variant thereof. In some embodiments, at least 20 gRNA polynucleotides each comprise a homology region complementary to a different gene sequence of any one of SEQ ID NOs: 1-135 or a variant thereof. In some embodiments, at least 50 gRNA polynucleotides each comprise a homology region complementary to a different gene sequence of any one of SEQ ID NOs: 1-135 or a variant thereof. In some embodiments, at least 100 gRNA polynucleotides each comprise a homology region complementary to a different gene sequence of any one of SEQ ID NOs: 1-135 or a variant thereof. In some embodiments, at least 135 gRNA polynucleotides each comprise a homology region complementary to a different gene sequence of any one of SEQ ID NOs: 1-135 or a variant thereof.

[0016] In some embodiments, the composition comprises at least 2 gRNA polynucleotides per gene sequence, wherein the at least 2 gRNA polynucleotides per gene sequence comprises different sequences. In some embodiments, the composition comprises 8 gRNA polynucleotides per gene sequence, wherein the 8 gRNA polynucleotides per gene sequence comprises different sequences. In some embodiments, the at least 2 or at least 8 gRNA polynucleotides per gene sequence are complementary to non-overlapping regions of the same gene sequence.

[0017] In some embodiments, the composition comprises one or more negative control gRNA polynucleotides. In some embodiments, the negative control gRNA polynucleotides comprise a randomly generated homology region. In some embodiments, the negative control gRNA polynucleotides comprise homology regions that are complementary to genes that are not known to be involved in T cell function. In some embodiments, the negative control gRNA polynucleotides comprise homology regions that are complementary intergenic regions.

[0018] In some embodiments, the composition comprises at least one gRNA polynucleotide comprising a sequence of any one of SEQ ID NOs: 136-1315. In some embodiments, the composition comprising at least 10 gRNA polynucleotides each comprising a different sequence of any one of SEQ ID NOs: 136-1315. In some embodiments, the composition comprising at least 100 gRNA polynucleotides each comprising a different sequence of any one of SEQ ID NOs: 136-1315. In some embodiments, the composition comprising at least 1000 gRNA polynucleotides each comprising a different sequence of any one of SEQ ID NOs: 136-1315. In some aspects, this application discloses, a composition comprising a plurality of gRNA polynucleotides comprising the sequences of SEQ ID NOs: 136-1315. In some embodiments, the plurality of guide RNA polynucleotides consists of at most 200,000 gRNA polynucleotides having different sequences. In some embodiments, the plurality of guide RNA polynucleotides consists of at most 100,000 gRNA polynucleotides having different sequences. In some embodiments, the plurality of guide RNA polynucleotides consists of at most 50,000 gRNA polynucleotides having different sequences. In some embodiments, the plurality of guide RNA polynucleotides consists of at most 25,000 gRNA polynucleotides having different sequences.

[0019] In some embodiments, the plurality of guide RNA polynucleotides consists of at most 15,000 gRNA polynucleotides having different sequences. In some embodiments, the plurality of guide RNA polynucleotides consists of at most 10,000 gRNA polynucleotides having different sequences. In some embodiments the plurality of guide RNA polynucleotides consists of at most 5,000 gRNA polynucleotides having different sequences. In some embodiments the plurality of guide RNA polynucleotides consists of at most 2,000 gRNA polynucleotides having different sequences. In some embodiments, the plurality of guide RNA polynucleotides consists of at most 1,080 gRNA polynucleotides having different sequences. In some embodiments, the plurality of guide RNA polynucleotides consists of at most 500 gRNA polynucleotides having different sequences. In some embodiments, the plurality of guide RNA polynucleotides consists of at most 250 gRNA polynucleotides having different sequences. In some embodiments, the plurality of guide RNA polynucleotides consists of at most 100 gRNA polynucleotides having different sequences. In some embodiments, the plurality of guide RNA polynucleotides consists of at most 50 gRNA polynucleotides having different sequences. In some embodiments, the plurality of guide RNA polynucleotides consists of at most 10 gRNA polynucleotides having different sequences.

[0020] In some embodiments, at least some of the plurality of gRNA polynucleotides are not cross-reactive with more than one gene. In some embodiments, the composition does not comprise a gRNA homology region that is complementary to a sense strand or an antisense strand of a gene encoding a p53, Rb, PTEN, BRCA1, and/or BRCA2, or a variant thereof. In some embodiments, the composition does not comprise a gRNA that is complementary to a sense strand or an antisense strand of a gene encoding P53, PTEN, APC, P16INK4a, P15INK4b, Cadherin-1, RB1, BRCA1, Wilms tumor 1, STK11, Smad4, BRCA2, CHEK2, P14arf, P21, P73, PTCH1, and/or MSH2, or a variant thereof.

[0021] In some embodiments, at least 1 gRNA polynucleotide comprises a homology region that is complementary to a sense strand or an antisense strand of a gene encoded by IL2RA (SEQ ID NO: 65) or a variant thereof.

[0022] In some embodiments, at least 1 gRNA polynucleotide comprises a homology region that is complementary to a sense strand or an antisense strand of a gene encoded by GATA3 (SEQ ID NO: 46) or a variant thereof.

[0023] In some embodiments, at least 1 gRNA polynucleotide comprises a homology region that is complementary to a sense strand or an antisense strand of a gene encoded by AGPS (SEQ ID NO: 3) or a variant thereof.

[0024] In some embodiments, at least 1 gRNA polynucleotide comprises a homology region that is complementary to a sense strand or an antisense strand of a gene encoded by PTPN2 (SEQ ID NO: 98) or a variant thereof.

[0025] In some embodiments, at least 1 gRNA polynucleotide comprises a homology region that is complementary to a sense strand or an antisense strand of a gene encoded by LAG3 (SEQ ID NO: 76) or a variant thereof.

[0026] In some embodiments, at least 1 gRNA polynucleotide comprises a homology region that is complementary to a sense strand or an antisense strand of a gene encoded by PDCD1 (SEQ ID NO: 91) or a variant thereof.

[0027] In some embodiments, at least 1 gRNA polynucleotide comprises a homology region that is complementary to a sense strand or an antisense strand of a gene encoded by TGFBR2 (SEQ ID NO: 121) or a variant thereof.

[0028] In some embodiments, at least 1 gRNA polynucleotide comprises a homology region that is complementary to a sense strand or an antisense strand of a gene encoded by RARA (SEQ ID NO: 99) or a variant thereof.

[0029] In some embodiments, at least 1 gRNA polynucleotide comprises a homology region that is complementary to a sense strand or an antisense strand of a gene encoded by SmarcB1 (SEQ ID NO: 113) or a variant thereof.

[0030] In some embodiments, at least 1 gRNA polynucleotide comprises a homology region that is complementary to a sense strand or an antisense strand of a gene encoded by CDKN1B (SEQ ID NO: 18) or a variant thereof.

[0031] In some embodiments, at least 1 gRNA polynucleotide comprises a homology region that is complementary to a sense strand or an antisense strand of a gene encoded by RunX (SEQ ID NO: 107) or a variant thereof.

[0032] In some embodiments, at least 1 gRNA polynucleotide comprises a homology region that is complementary to a sense strand or an antisense strand of a gene encoded by TCF7 (SEQ ID NO: 118) or a variant thereof.

[0033] In some embodiments, at least 2 gRNA polynucleotides each comprise a homology region that is complementary to a sense strand or an antisense strand of a different gene encoded by any one of IL2RA (SEQ ID NO: 65) or a variant thereof, GATA3 (SEQ ID NO: 46) or a variant thereof, AGPS (SEQ ID NO: 3) or a variant thereof, PTPN2 (SEQ ID NO: 98) or a variant thereof, LAG3 (SEQ ID NO: 76) or a variant thereof, PDCD1 (SEQ ID NO: 91) or a variant thereof, TGFBR2 (SEQ ID NO: 121) or a variant thereof, RARA (SEQ ID NO: 99) or a variant thereof, SmarcB1 (SEQ ID NO: 113) or a variant thereof, CDKN1B (SEQ ID NO: 18) or a variant thereof, RunX (SEQ ID NO: 107) or a variant thereof, and TCF7 (SEQ ID NO: 118) or a variant thereof.

[0034] In some embodiments, at least 5 gRNA polynucleotides each comprise a homology region that is complementary to a sense strand or an antisense strand of a different gene encoded by any one of IL2RA (SEQ ID NO: 65) or a variant thereof, GATA3 (SEQ ID NO: 46) or a variant thereof, AGPS (SEQ ID NO: 3) or a variant thereof, PTPN2 (SEQ ID NO: 98) or a variant thereof, LAG3 (SEQ ID NO: 76) or a variant thereof, PDCD1 (SEQ ID NO: 91) or a variant thereof, TGFBR2 (SEQ ID NO: 121) or a variant thereof, RARA (SEQ ID NO: 99) or a variant thereof, SmarcB1 (SEQ ID NO: 113) or a variant thereof, CDKN1B (SEQ ID NO: 18) or a variant thereof, RunX (SEQ ID NO: 107) or a variant thereof, and TCF7 (SEQ ID NO: 118) or a variant thereof.

[0035] In some embodiments, at least 7 gRNA polynucleotides each comprise a homology region that is complementary to a sense strand or an antisense strand of a different gene encoded by any one of IL2RA (SEQ ID NO: 65) or a variant thereof, GATA3 (SEQ ID NO: 46) or a variant thereof, AGPS (SEQ ID NO: 3) or a variant thereof, PTPN2 (SEQ ID NO: 98) or a variant thereof, LAG3 (SEQ ID NO: 76) or a variant thereof, PDCD1 (SEQ ID NO: 91) or a variant thereof, TGFBR2 (SEQ ID NO: 121) or a variant thereof, RARA (SEQ ID NO: 99) or a variant thereof, SmarcB1 (SEQ ID NO: 113) or a variant thereof, CDKN1B (SEQ ID NO: 18) or a variant thereof, RunX (SEQ ID NO: 107) or a variant thereof, and TCF7 (SEQ ID NO: 118) or a variant thereof.

[0036] In some embodiments, 10 gRNA polynucleotides each polynucleotides each comprise a homology region that is complementary to a sense strand or an antisense strand of a different gene encoded by any one of IL2RA (SEQ ID NO: 65) or a variant thereof, GATA3 (SEQ ID NO: 46) or a variant thereof, AGPS (SEQ ID NO: 3) or a variant thereof, PTPN2 (SEQ ID NO: 98) or a variant thereof, LAG3 (SEQ ID NO: 76) or a variant thereof, PDCD1 (SEQ ID NO: 91) or a variant thereof, TGFBR2 (SEQ ID NO: 121) or a variant thereof, RARA (SEQ ID NO: 99) or a variant thereof, SmarcB1 (SEQ ID NO: 113) or a variant thereof, CDKN1B (SEQ ID NO: 18) or a variant thereof, RunX (SEQ ID NO: 107) or a variant thereof, and TCF7 (SEQ ID NO: 118) or a variant thereof.

[0037] In some embodiments, 14 gRNA polynucleotides each polynucleotides each comprise a homology region that is complementary to a sense strand or an antisense strand of a different gene encoded by any one of IL2RA (SEQ ID NO: 65) or a variant thereof, GATA3 (SEQ ID NO: 46) or a variant thereof, AGPS (SEQ ID NO: 3) or a variant thereof, PTPN2 (SEQ ID NO: 98) or a variant thereof, LAG3 (SEQ ID NO: 76) or a variant thereof, PDCD1 (SEQ ID NO: 91) or a variant thereof, TGFBR2 (SEQ ID NO: 121) or a variant thereof, RARA (SEQ ID NO: 99) or a variant thereof, SmarcB1 (SEQ ID NO: 113) or a variant thereof, CDKN1B (SEQ ID NO: 18) or a variant thereof, RunX (SEQ ID NO: 107) or a variant thereof, and TCF7 (SEQ ID NO: 118) or a variant thereof.

[0038] In some embodiments, the composition comprises: a first gRNA polynucleotide comprising a homology region that is complementary to a sense strand or an antisense strand of a gene encoded by IL2RA (SEQ ID NO: 65) or a variant thereof; a second gRNA polynucleotide comprising a homology region that is complementary to a sense strand or an antisense strand of a gene encoded by GATA3 (SEQ ID NO: 46) or a variant thereof; a third gRNA polynucleotide comprising a homology region that is complementary to a sense strand or an antisense strand of a gene encoded by AGPS (SEQ ID NO: 3) or a variant thereof; a fourth gRNA polynucleotide comprising a homology region that is complementary to a sense strand or an antisense strand of a gene encoded by PTPN2 (SEQ ID NO: 98) or a variant thereof; a fifth gRNA polynucleotide comprising a homology region that is complementary to a sense strand or an antisense strand of a gene encoded by LAG3 (SEQ ID NO: 76) or a variant thereof; a sixth gRNA polynucleotide comprising a homology region that is complementary to a sense strand or an antisense strand of a gene encoded by PDCD1 (SEQ ID NO: 91) or a variant thereof; a seventh gRNA polynucleotide comprising a homology region that is complementary to a sense strand or an antisense strand of a gene encoded by TGFBR2 (SEQ ID NO: 121) or a variant thereof; a eighth gRNA polynucleotide comprising a homology region that is complementary to a sense strand or an antisense strand of a gene encoded by RARA (SEQ ID NO: 99) or a variant thereof; a nineth gRNA polynucleotide comprising a homology region that is complementary to a sense strand or an antisense strand of a gene encoded by SmarcB1 (SEQ ID NO: 113) or a variant thereof; a tenth gRNA polynucleotide comprising a homology region that is complementary to a sense strand or an antisense strand of a gene encoded by CDKN1B (SEQ ID NO: 18) or a variant thereof or a variant thereof; a eleventh gRNA polynucleotide comprising a homology region that is complementary to a sense strand or an antisense strand of a gene encoded by RunX (SEQ ID NO: 107) or a variant thereof; and/or a twelve gRNA polynucleotide comprising a homology region that is complementary to a sense strand or an antisense strand of a gene encoded by TCF7 (SEQ ID NO: 118) or a variant thereof;

[0039] In some embodiments, the composition does not comprise a gRNA polynucleotide comprising a homology region that is complementary to a sense strand or an antisense strand of a gene encoded by RASA2 (SEQ ID NO: 102).

[0040] In some embodiments, the composition does not comprise a gRNA polynucleotide comprising a homology region that is complementary to a sense strand or an antisense strand of a gene encoded by one or more of RASA2 (SEQ ID NO: 102) or a variant thereof, TBL1XR1 (SEQ ID NO: 117) or a variant thereof, MEF2D (SEQ ID NO: 80) or a variant thereof, ARIH2 (SEQ ID NO: 6) or a variant thereof, NDUFB10 (SEQ ID NO: 82) or a variant thereof, STAT3 (SEQ ID NO: 115) or a variant thereof, ELOB (SEQ ID NO: 33) or a variant thereof, IRF2 (SEQ ID NO: 67) or a variant thereof, SMARCA4 (SEQ ID NO: 112) or a variant thereof, CYBER4 (SEQ ID NO: 24) or a variant thereof, and LEF1 (SEQ ID NO: 78) or a variant thereof.

[0041] In some embodiments, the composition does not comprise a gRNA polynucleotide comprising a homology region that is complementary to a sense strand or an antisense strand of a gene encoded by at least 3 of RASA2 (SEQ ID NO: 102) or a variant thereof, TBL1XR1 (SEQ ID NO: 117) or a variant thereof, MEF2D (SEQ ID NO: 80) or a variant thereof, ARIH2 (SEQ ID NO: 6) or a variant thereof, NDUFB10 (SEQ ID NO: 82) or a variant thereof, STAT3 (SEQ ID NO: 115) or a variant thereof, ELOB (SEQ ID NO: 33) or a variant thereof, IRF2 (SEQ ID NO: 67) or a variant thereof, SMARCA4 (SEQ ID NO: 112) or a variant thereof, CYB5R4 (SEQ ID NO: 24) or a variant thereof, and LEF1 (SEQ ID NO: 78) or a variant thereof.

[0042] In some embodiments, the composition does not comprise a gRNA polynucleotide comprising a homology region that is complementary to a sense strand or an antisense strand of a gene encoded by at least 5 of RASA2 (SEQ ID NO: 102) or a variant thereof, TBL1XR1 (SEQ ID NO: 117) or a variant thereof, MEF2D (SEQ ID NO: 80) or a variant thereof, ARIH2 (SEQ ID NO: 6) or a variant thereof, NDUFB10 (SEQ ID NO: 82) or a variant thereof, STAT3 (SEQ ID NO: 115) or a variant thereof, ELOB (SEQ ID NO: 33) or a variant thereof, IRF2 (SEQ ID NO: 67) or a variant thereof, SMARCA4 (SEQ ID NO: 112) or a variant thereof, CYB5R4 (SEQ ID NO: 24) or a variant thereof, and LEF1 (SEQ ID NO: 78) or a variant thereof.

[0043] In some embodiments, the plurality of gRNA polynucleotides are Cas9 protein gRNA polynucleotides or a Cas12 protein gRNA polynucleotides. In some embodiments, the plurality of gRNA polynucleotides comprises sequences complementary to at most 15,000 different gene sequences. In some embodiments, the plurality of gRNA polynucleotides comprise sequences complementary to at most 10,000 different gene sequences. In some embodiments, the plurality of gRNA polynucleotides comprises sequences complementary to at most 5,000 different gene sequences. In some embodiments, the plurality of gRNA polynucleotides comprises sequences complementary to at most 2,500 different gene sequences. In some embodiments, the plurality of gRNA polynucleotides comprises sequences complementary to at most 1,000 different gene sequences. In some embodiments, the plurality of gRNA polynucleotides comprise sequences complementary to at most 500 different gene sequences. In some embodiments, the plurality of gRNA polynucleotides comprises sequences complementary to at most 200 different gene sequences. In some embodiments, the plurality of gRNA polynucleotides comprises sequences complementary to at most 135 different gene sequences. In some embodiments, the composition is for use in a human CAR-T cell screen.

[0044] In some aspects, this application discloses a guide RNA polynucleotide comprising a sequence of any one of SEQ ID NOs: 136-1315.

[0045] In some aspects, this application discloses a plasmid comprising any one of the gRNA polynucleotides of any one of the compositions described herein or the guide RNAs described herein.

[0046] In some aspects, this application discloses s plasmid library, comprising at least 2 plasmids any one of the gRNA polynucleotides of any one of the compositions described herein or the guide RNAs described herein. In some embodiments, at least some of the at least 2 plasmids comprise a gRNA polynucleotide of the composition of any one of claims 1-72 or a guide RNA polynucleotide of claim 74. In some embodiments, each plasmid comprises a gRNA polynucleotide of the composition described herein or a guide RNA polynucleotide described herein.

[0047] In some aspects, this application discloses a plasmid library comprising each of SEQ ID NOs: 136-1315 encoded on a different plasmid.

[0048] In some aspects, this application discloses a gRNA vector comprising: (1) a first gRNA polynucleotide comprising a homology region that is complementary to a sense strand or an antisense strand encoded by a the TCR/CD3 complex (SEQ ID NOs: 1383-1398) of a T cell, and (2) a second gRNA polynucleotide.

[0049] In some embodiments, the second gRNA polynucleotide comprises any one of the gRNA polynucleotides of the composition described herein or a guide RNA described herein. In some embodiments, the first gRNA polynucleotide and the second gRNA polynucleotide are in an inverted orientation. In some embodiments, the first gRNA polynucleotide and the second gRNA polynucleotide are in a tandem orientation. In some embodiments, each gRNA encoding sequence is operably linked to a promoter. In some embodiments, the promoter is a constitutively active promoter or an inducible promoter. In some embodiments, the promoter is selected from the group consisting of U6 and EF1a promoters. In some embodiments, the promoter is a U6 promotor, or an H1 promoter, optionally wherein the first gRNA polynucleotide is operably linked to a U6 promoter and the second gRNA polynucleotide is operably linked to a H1 promoter.

[0050] In some embodiments, the gRNA vector further comprises a selectable marker, optionally wherein the selectable marker is compatible for use in humans. In some embodiments, the selectable marker is selected from the group consisting of LGNFR, EGFR, CD19, CD20, CD34 and truncated versions thereof. In some embodiments, the selectable marker is operably linked to a promoter, optionally a weak promoter. In some embodiments, the promoter is selected from the group consisting of PGK, CMV, EF1a, and tissue-specific promoters.

[0051] In some embodiments, the vector is an adeno-associated vector, a retro-viral vector, or a lentiviral vector. In some embodiments, the lentiviral vector is a third-generation self-inactivating (SIN) lentiviral vector.

[0052] In some embodiments, the vector comprises a suicide gene. In some embodiments, the suicide gene is selected from the group consisting of icaspase9, tEGFR, tCD29, CD20, and tHer2. In some embodiments, the gRNA vector comprises a nucleic acid sequence of any one of SEQ ID NOs: 1318.

[0053] In some embodiments, the gRNA vector further comprises a polynucleotide encoding a CRISPR protein. In some embodiments, the CRISPR protein is Cas9 or Cas12.

[0054] In some aspects, this application discloses a gRNA vector library, comprising at least 2 gRNA vectors described herein. In some embodiments, each vector comprises a gRNA polynucleotide of a composition described herein or a guide RNA described herein. In some embodiments, at least 10 vectors of the library each comprise a different gRNA polynucleotide homology region that is complementary to a sense strand or an antisense strand of a different gene encoded by any one of SEQ ID NOs: 1-135 or a variant thereof.

[0055] In some embodiments, the gRNA vector library is a current good manufacturing practice (cGMP)-grade gRNA vector library. In some embodiments, the cGMP-grade gRNA vector library is a cGMP-grade gRNA lentiviral gRNA vector library.

[0056] In some embodiments, at least 20 vectors of the library each comprise a different gRNA polynucleotide homology region that is complementary to a sense strand or an antisense strand of a different gene encoded by any one of SEQ ID NOs: 1-135 or a variant thereof. In some embodiments, at least 50 vectors of the library each comprise a different gRNA polynucleotide homology region that is complementary to a sense strand or an antisense strand of a different gene encoded by any one of SEQ ID NOs: 1-135 or a variant thereof. In some embodiments, at least one-hundred vectors of the library each comprise a different gRNA polynucleotide homology region that is complementary to a sense strand or an antisense strand of a different gene encoded by any one of SEQ ID NOs: 1-135 or a variant thereof. In some embodiments, at least one-hundred thirty-five vectors of the library each comprise a different gRNA polynucleotide homology region that is complementary to a sense strand or an antisense strand of a different gene encoded by any one of SEQ ID NOs: 1-135 or a variant thereof.

[0057] In some aspects, this application discloses a CAR vector comprising a polynucleotide that encodes a chimeric antigen receptor (CAR). In some embodiments, the vector is a self-inactivating vector. In some embodiments, the vector is an adeno-associated vector, a retro-viral vector, or a lentiviral vector. In some embodiments, the vector is a third-generation self-inactivating (SIN) lentiviral vector.

[0058] In some embodiments, the CAR is operably linked to a promoter, optionally an EF1a or EF1a-short promoter.

[0059] In some embodiments, the vector comprises a suicide gene. In some embodiments, the suicide gene is selected from the group consisting of icaspase9, tEGFR, tCD29, CD20, and tHer2. In some embodiments, the vector comprises a reporter. In some embodiments, the reporter is selected from the group consisting of truncated CD34, tEGFR, tCD19, tCD20, tCD34, and tHer2. In some embodiments, the CAR comprises a polynucleotide encoding an antigen binding domain that binds to any one of CD19, CD79b, TACI, BCMA, MUC1, MUC16, B7H3, mesothelin, CD70, PSMA, PSCA, EGFRvIII, claudin6, binds to any pair of CD19/CD79b, BCMA/TACI, or is a TriPRIL antigen binding domain.

[0060] In some embodiments, the CAR comprises a polynucleotide encoding an antigen binding domain that binds to mesothelin. In some embodiments, the CAR further comprises a transmembrane domain and an intracellular signaling domain. In some embodiments, the transmembrane domain is selected from the group consisting of alpha, beta or zeta chain of a T cell receptor, CD28, CD3 epsilon, CD45, CD4, CD5, CD8, CD9, CD16, CD22, CD33, CD37, CD64, CD80, CD86, CD134, CD137, CD154, KIRDS2, OX40, CD2, CD27, LFA-1 (CD11a, CD18), ICOS (CD278), 4-1BB (CD137), 4-1BBL, GITR, CD40, BAFFR, HVEM (LIGHTR), SLAMF7, NKp80 (KLRFI), CD160, CD19, IL2R beta, IL2R gamma, IL7R a, ITGA1, VLA1, CD49a, ITGA4, IA4, CD49D, ITGA6, VLA-6, CD49f, ITGAD, CD11d, ITGAE, CD103, ITGAL, CD11a, LFA-1, ITGAM, CD11b, ITGAX, CD11c, ITGB1, CD29, ITGB2, CD18, LFA-1, ITGB7, TNFR2, DNAM1 (CD226), SLAMF4 (CD244, 2B4), CD84, CD96 (Tactile), CEACAM1, CRT AM, Ly9 (CD229), CD160 (BY55), PSGL1, CD100 (SEMA4D), SLAMF6 (NTB-A, Ly108), SLAM (SLAMF1, CD150, IPO-3), BLAME (SLAMF8), SELPLG (CD162), LTBR, PAG/Cbp, NKp44, NKp30, NKp46, NKG2D, and/or NKG2C. In some embodiments, the intracellular signaling domain is selected from the group consisting of CD28, 4-1BB, CD27, TCR-zeta, FcR-gamma, FcR-beta, CD3-gamma, CD3-theta, CD3-sigma, CD3-eta, CD3-epsilon, CD3-zeta, CD22, CD79a, CD79b, and CD66d.

[0061] In some embodiments, a 2A ribosomal skip element or an internal ribosome entry site (IRES) is downstream of the CAR. In some embodiments, the CAR vector comprises a sequence of SEQ ID NO: 1319. In some aspects, this application discloses a composition comprising the gRNA vector of any one of claims as described herein and a CAR vector of as described herein.

[0062] In some aspects, this application discloses, a CAR-T cell comprising the composition comprising the gRNA vector of any one of claims as described herein and a CAR vector of as described herein. In some aspects, this application discloses a CAR-T cell comprising one, two, or three of: a mutation in a gene corresponding to the gene sequence of any one of SEQ ID NOs: 1-135 or a variant thereof, a gRNA polynucleotide of the composition as described herein, a plasmid as described herein, or a gRNA vector as described herein. In some embodiments, the CAR-T cell further comprises a CAR vector as described herein.

[0063] In some embodiments, the mutation is a loss of function mutation. In some embodiments, the mutation is an insertion or a deletion. In some embodiments, the insertion or deletion mutation causes a frameshift. In some embodiments, the CAR-T cell further comprises an mRNA encoding a CRISPR protein. In some embodiments, the CAR-T cell is CD34 positive and CD3 negative. In some embodiments, a T cell used to make the CAR-T cell is from a mammalian subject. In some embodiments, a T cell used to make the CAR-T cell is from a human subject. In some embodiments, a T cell used to produce the CAR-T cell is collected using leukapheresis.

[0064] In some embodiments, the CAR-T cell is activated. In some embodiments, the CAR-T cell is activated using anti-CD3 and anti-CD28 antibodies. In some embodiments, the CAR-T cell is activated using anti-CD3 antibody. In some embodiments, the CAR-T cell is activated using anti-CD3 antibody and IL-2. In some embodiments, the CAR-T cell is activated using anti-CD3 antibody, IL-2 and PHA. In some embodiments, the anti-CD3 antibody, the anti-CD28 antibody, the IL2 and the PHA are either soluble or plate-bound. In some embodiments, the CRISPR protein is Cas9 or Cas12. In some embodiments, the cell does not comprise a DNA polynucleotide encoding a CRISPR protein. In some embodiments, the CAR-T cell is CD34 positive, CD3 negative and LNGFR positive.

[0065] In some embodiments, the CAR-T cells of the library are selected from the CAR-T cells described herein. In some embodiments, at least 2 CAR-T Cells of the library each comprise a different gRNA polynucleotide comprising a homology region that is complementary to a different gene sequence of any one of SEQ ID NOs: 1-135 or a variant thereof. In some embodiments, at least 10 CAR-T Cells of the library each comprise a different gRNA polynucleotide comprising a homology region that is complementary to a different gene sequence of any one of SEQ ID NOs: 1-135 or a variant thereof. In some embodiments, at least 20 CAR-T Cells of the library each comprise a different gRNA polynucleotide comprising a homology region that is complementary to a different gene sequence of any one of SEQ ID NOs: 1-135 or a variant thereof. In some embodiments, at least 50 CAR-T Cells of the library each comprise a different gRNA polynucleotide comprising a homology region that is complementary to a different gene sequence of any one of SEQ ID NOs: 1-135 or a variant thereof. In some embodiments, at least 100 CAR-T Cells of the library each comprise a different gRNA polynucleotide comprising a homology region that is complementary to a different gene sequence of any one of SEQ ID NOs: 1-135 or a variant thereof. In some embodiments, 135 CAR-T Cells of the library each comprise a different gRNA polynucleotide comprising a homology region that is complementary to a different gene sequence of any one of SEQ ID NOs: 1-135 or a variant thereof.

[0066] In some embodiments, SEQ ID NOs: 136-1315 are each present in at least one CAR-T cell.

[0067] In some aspects, this application discloses a method of producing a mutant CAR-T cell library comprising: (a) activating T cells, (b) transfecting the T cells with the gRNA vector library described herein, (c) transfecting the T cells with the CAR vector described herein, and (d) introducing a CRISPR protein encoding mRNA or a CRISPR protein into the T cell.

[0068] In some aspects, this application discloses a method of producing a mutant CAR-T cell library comprising: (a) activating T cells, (b) transfecting the T cells with the gRNA vector library described herein, and (c) transfecting the T cells with the CAR vector of any one of claims C1-C11, wherein the gRNA vector or the CAR vector comprises a polynucleotide encoding a CRISPR protein.

[0069] In some embodiments, the method further comprises collecting T cells from a subject. In some embodiments, the method further comprises purifying T cells that comprise a CAR vector and comprise a CRISPR induced gene mutation. In some embodiments, the T cells are collected using leukapheresis. In some embodiments, the T cells are collected from a human or mouse subject. In some embodiments, the T cells are activated using anti-CD3 and anti-CD28 antibodies. In some embodiments, the gRNA vector library is transduced with a multiplicity of infection (MOI) between 0.1-1. In some embodiments, the MOI is 0.3-0.7. In some embodiments, the MOI is 0.4-0.6. In some embodiments, the MOI is 0.5. In some embodiments, the CAR vector is transduced with an MOI up to 20.

[0070] In some embodiments, the CRISPR protein is Cas9 or Cas12. In some embodiments, the CRISPR protein mRNA or CRISPR protein is introduced using electroporation. In some embodiments, the CRISPR mRNA is expressed from the gRNA vector or the CAR vector. In some embodiments, electroporation is performed 3-7 days after transduction with the gRNA vector and the CAR vector. In some embodiments, the method further comprises selecting T cells that are CD3 negative, CD34 positive, and optionally LNGFR positive. In some embodiments, selection is performed using magnetic beads and/or flow cytometry sorting. In some aspects, this application discloses a mutant CAR-T cell library produced using the methods described herein.

[0071] In some aspects, this application discloses a method of identifying gRNA polynucleotides associated with CAR-T cell efficacy in vivo comprising: (a) administering to a subject a mutant CAR-T cell library of any one of claims E1-E7 or F15, (b) collecting one or more samples comprising a plurality of mutant CAR-T cells of the mutant CAR-T cell library from the subject, (c) sequencing the gRNA polynucleotides from the mutant CAR-T cells collected in (b), and
[0072] (d) evaluating the change in relative abundance of each gRNA polynucleotide based on the sequencing in (c).

[0073] In some embodiments, the method further comprises: (e) identifying a gene associated with a gRNA polynucleotide having an increase in relative abundance; (f) producing a modified CAR-T cell comprising a mutation in the gene identified in (e); and (g) administering the modified CAR-T cell to the subject.

[0074] In some embodiments, the mutant CAR-T cell library comprises a genome-wide CAR-T cell mutant library. In some embodiments, the library comprises negative control CAR-T cells. In some embodiments, the negative control CAR-T cells comprise a negative control gRNA polynucleotide described herein. In some embodiments, the subject is human. In some embodiments, the subject has cancer. In some embodiments, the cancer is selected from the group consisting of ovarian cancer, pancreatic cancer, lung cancer, prostate cancer, breast cancer, AML, multiple myeloma, and B cell lymphomas. In some embodiments, the CAR comprises an antigen binding domain that binds to an antigen expressed by the cancer.

[0075] In some embodiments, the CAR comprises an antigen binding domain selected from the group consisting of CD19, CD79b, TACI, BCMA, MUC1, MUC16, B7H3, mesothelin, CD70, PSMA, PSCA, EGFRvIII, claudin6, binds to any pair of CD19/CD79b, BCMA/TACI, or is a TriPRIL. In some embodiments, the samples are collected from the subject's blood. In some embodiments, at least 3 samples are collected from the subject. In some embodiments, at least 5 samples are collected via venipuncture, apheresis, or resection of tumor. In some embodiments, samples are collected from the subject after step (a) at one or more of day 3, day 7, day 10, day 14, day 21, month 1, month 2, month 3, month 6, month 9, month 12, month 15, month 18, month 21, and month 24 after administering the mutant CAR-T cell library. In some embodiments, a sample is collected from the subject after step (a) at day 21 after administering the mutant CAR-T cell library.

[0076] In some embodiments, the method further comprises extracting the mutant CAR T cell from the sample prior to sequencing. In some embodiments, extraction is performed by isolating T cells that are CD3 negative, CD34 positive, and optionally LNGFR positive.

[0077] In some embodiments, the method further comprises isolating genomic DNA from the mutant CAR-T cells. In some embodiments, the method further comprises isolating gRNA polynucleotides from the mutant CAR-T cells. In some embodiments, the method further comprises isolating the RNA from the mutant CAR-T cells and optionally sequencing the RNA. In some embodiments, the method further comprises amplifying the gRNA polynucleotides of the mutant CAR-T cells to produce amplicons of any thereof. In some embodiments, the gRNA polynucleotides amplified are genomic DNA, vector DNA, or RNA. In some embodiments, primers of SEQ ID NOs: 1324-1325 are used for amplification. In some embodiments, the gRNA polynucleotides or amplicons thereof are sequenced. In some embodiments, the gRNA polynucleotide or amplicons thereof are sequenced using next-generation sequencing.

[0078] In some embodiments, the efficacy of each mutant CAR-T cell is evaluated based on persistence in vivo and tumor cytotoxicity. In some embodiments, persistence in vivo and tumor cytotoxicity are measured using flow cytometry and PCR. In some embodiments, quantifying persistence is performed by calculating the relative change in each gRNA over time.

[0079] In some embodiments, quantifying persistence is performed by calculating the relative change in each gRNA over time compared to a gRNA polynucleotide from a negative control CAR-T cell. In some embodiments, quantifying persistence is performed by calculating the relative change in each gRNA over time across at least 3 time points and calculating a slope of relative change. In some embodiments, tumor cytotoxicity is quantified using clinical imaging and/or bone marrow evaluation. In some aspects, this application discloses a CAR natural killer (NK) cell comprising the composition described herein.

[0080] In some aspects, this application discloses a CAR-NK cell comprising one, two, or three of: a mutation in a gene corresponding to the gene sequence of any one of SEQ ID NOS: 1-135 or a variant thereof, a gRNA polynucleotide of the composition described herein, a plasmid described herein, or a gRNA vector described herein. In some embodiments, the CAR-NK cell further comprises a CAR vector. In some embodiments, the mutation is a loss of function mutation. In some embodiments, the mutation is an insertion or a deletion. In some embodiments, the insertion or deletion mutation causes a frameshift.

[0081] In some embodiments, the CAR-NK further comprises an mRNA encoding a CRISPR protein and/or a CRISPR protein. In some embodiments, the NK cell is CD34 positive and CD3 negative. In some embodiments, a NK cell used to make the NK cell is from a mammalian subject. In some embodiments, a NK cell used to make the NK cell is from a human subject. In some embodiments, a NK cell used to produce the NK cell is collected from blood, optionally cord blood or peripheral blood. In some embodiments, the NK cell is activated. In some embodiments, the NK cell is activated using irradiated feeder cells, IL-2 and IL-15. In some embodiments, the NK cell is activated using irradiated K562 cells. In some embodiments, the NK cell is activated using IL-21. In some embodiments, the NK cell is activated using 4-1BBL, IL-2, and irradiated K562 cells expressing membrane bound IL-15. In some embodiments, the CRISPR protein is Cas9 or Cas12. In some embodiments, the NK cell does not comprise a DNA polynucleotide encoding a CRISPR protein. In some embodiments, the NK cell is CD34 positive, CD3 negative and LNGFR positive.

[0082] In some embodiments, the NK cells of the library are selected from NK cells described herein. In some embodiments, at least 2 CAR-NK Cells of the library each comprise a different gRNA polynucleotide comprising a homology region that is complementary to a different gene sequence of any one of SEQ ID NOs: 1-135 or a variant thereof. In some embodiments, at least 10 CAR-NK Cells of the library each comprise a different gRNA polynucleotide comprising a homology region that is complementary to a different gene sequence of any one of SEQ ID NOs: 1-135 or a variant thereof. In some embodiments, at least 20 CAR-NK Cells of the library each comprise a different gRNA polynucleotide comprising a homology region that is complementary to a different gene sequence of any one of SEQ ID NOs: 1-135 or a variant thereof. In some embodiments, at least 50 CAR-NK Cells of the library each comprise a different gRNA polynucleotide comprising a homology region that is complementary to a different gene sequence of any one of SEQ ID NOs: 1-135 or a variant thereof. In some embodiments, at least 100 CAR-NK Cells of the library each comprise a different gRNA polynucleotide comprising a homology region that is complementary to a different gene sequence of any one of SEQ ID NOs: 1-135 or a variant thereof. In some embodiments, 135 CAR-NK Cells of the library each comprise a different gRNA polynucleotide comprising a homology region that is complementary to a different gene sequence of any one of SEQ ID NOs: 1-135 or a variant thereof. In some embodiments, SEQ ID NOs: 136-1315 are each present in at least one NK cell.

[0083] In some aspects, this application discloses a method of producing a mutant CAR-NK cell library comprising: (a) activating CAR-NK cells, (b) transducing the CAR-NK cells with the gRNA vector library described herein, (c) transducing the CAR-NK cells with the CAR vector described herein, and (d) introducing a CRISPR protein encoding mRNA or a CRISPR protein into the NK cell.

[0084] In some aspects, this application discloses a method of producing a mutant CAR-NK cell library comprising: (a) activating CAR-NK cells, (b) transducing the CAR-NK cells with the gRNA vector library described herein, and (c) transducing the CAR-NK cells with the CAR vector described herein, wherein the gRNA vector or the CAR vector comprises a polynucleotide encoding a CRISPR protein.

[0085] In some embodiments, the method of claims further comprises collecting CAR-NK cells from a subject. In some embodiments, the method further comprises purifying CAR-NK cells that comprise a CAR vector and comprise a CRISPR induced gene mutation. In some embodiments, the CAR-NK cells are collected using leukapheresis. In some embodiments, the CAR-NK cells are collected from a human or mouse subject. In some embodiments, the CAR-NK cells are activated using anti-CD3 and anti-CD28 antibodies. In some embodiments, the gRNA vector library is transduced with an multiplicity of infection (MOI) between 0.1-1. In some embodiments, the MOI is 0.3-0.7. In some embodiments, the MOI is 0.4-0.6. In some embodiments, the MOI is 0.5. In some embodiments, the CAR vector is transduced with an MOI up to 20. In some embodiments, the CRISPR protein is Cas9 or Cas12.

[0086] In some embodiments, the CRISPR protein mRNA or CRISPR protein is introduced using electroporation. In some embodiments, the CRISPR mRNA is expressed from the gRNA vector or the CAR vector. In some embodiments, electroporation is performed 3-7 days after transduction with the gRNA vector and the CAR vector.

[0087] In some embodiments, the method further comprises selecting NK cells that are CD3 negative, CD34 positive. In some embodiments, the method further comprises selecting NK cells that are CD3 negative, CD34 positive and LNGFR positive.

[0088] In some embodiments, selection is performed using magnetic beads and/or flow cytometry sorting. In some aspects, this application discloses a mutant CAR-NK cell library produced using the methods described herein.

[0089] In some aspects, this application discloses, a method of identifying mutations that increase CAR-NK cell efficacy in vivo comprising: (a) administering to a subject a mutant CAR-NK cell library described herein, (b) collecting one or more samples comprising a plurality of mutant CAR-NK cells of the mutant NK cell library from the subject, (c) sequencing the gRNA polynucleotides from the mutant CAR-NK cells collected in (b), and (d) evaluating the change in relative abundance of each gRNA polynucleotide based on the sequencing in (c).

[0090] In some embodiments, the method further comprises (e) identifying a gene associated with a gRNA polynucleotide having an increase in relative abundance; (f) producing a modified CAR-T cell comprising a mutation in the gene identified in (e); and (g) administering the modified CAR-T cell to the subject.

[0091] In some embodiments, the mutant CAR-NK cell library comprises a genome-wide NK cell mutant library. In some embodiments, the library comprises negative control CAR-NK cells. In some embodiments, the negative control CAR-NK cells comprise a negative control gRNA polynucleotide a described herein. In some embodiments, the subject is human.

[0092] In some embodiments, the subject has cancer. In some embodiments, the cancer is selected from the group consisting of ovarian cancer, pancreatic cancer, lung cancer, prostate cancer, breast cancer, AML, multiple myeloma, and B cell lymphomas. In some embodiments, the CAR comprises an antigen binding domain that binds to an antigen expressed by the cancer.

[0093] In some embodiments, the CAR comprises an antigen binding domain selected from the group consisting of CD19, CD79b, TACI, BCMA, MUC1, MUC16, B7H3, mesothelin, CD70, PSMA, PSCA, EGFRVIII, claudin6, binds to any pair of CD19/CD79b, BCMA/TACI, or is a TriPRIL. In some embodiments, the samples are collected from the subject's blood. In some embodiments, at least 3 samples are collected from the subject. In some embodiments, at least 5 samples are collected via venipuncture, apheresis, or resection of tumor. In some embodiments, samples are collected from the subject after step (a) at one or more of day 3, day 7, day 10, day 14, day 21, month 1, month 2, month 3, month 6, month 9, month 12, month 15, month 18, month 21, and month 24 after administering the mutant CAR-T cell library. In some embodiments, a sample is collected from the subject after step (a) at day 21 after administering the mutant CAR-T cell library.

[0094] In some embodiments, the method further comprises extracting the mutant NK cell from the sample prior to sequencing. In some embodiments, extraction is performed by isolating NK cells that are CD3 negative, CD34 positive, and optionally LNGFR positive. In some embodiments, the method further comprises isolating genomic DNA from the mutant NK cells. In some embodiments, the method further comprises isolating gRNA polynucleotides from the mutant NK cells. In some embodiments, the method further comprises isolating the RNA from the mutant NK cells and optionally sequencing the RNA. In some embodiments, the method further comprises amplifying the gRNA polynucleotides of the mutant NK cells to produce amplicons of any thereof. In some embodiments, the gRNA polynucleotides amplified are genomic DNA, vector DNA, or RNA. In some embodiments, primers of SEQ ID NOs: 1324-1325 are used for amplification. In some embodiments, the gRNA polynucleotides or amplicons thereof are sequenced. In some embodiments, the gRNA polynucleotide or amplicons thereof are sequenced using next-generation sequencing. In some embodiments, the efficacy of each mutant NK cell is evaluated based on persistence in vivo and tumor cytotoxicity. In some embodiments, persistence in vivo and tumor cytotoxicity are measured using flow cytometry and PCR. In some embodiments, quantifying persistence is performed by calculating the relative change in each gRNA over time. In some embodiments, quantifying persistence is performed by calculating the relative change in each gRNA over time compared to a gRNA polynucleotide from a negative control NK cell. In some embodiments, quantifying persistence is performed by calculating the relative change in each gRNA over time across at least 3 timepoints and calculating a slope of relative change. In some embodiments, tumor cytotoxicity is quantified using clinical imaging and/or bone marrow evaluation.

### BRIEF DESCRIPTION OF THE DRAWINGS

[0095] The following drawings form part of the present specification and are included to further demonstrate certain aspects of the present disclosure, which can be better understood by reference to one or more of these drawings in combination with the detailed description of specific embodiments presented herein.

[0096] FIG. 1 shows a diagram of identifying mutant CAR-T cells that increase CAR-T cell survival in vivo. Patients undergo leukapheresis and their T cells are transduced with two lentiviral vectors: one to express the chimeric antigen receptor (CAR) and truncated CD34 (CD34t) and the other to express 2 guide RNAs (one a barcoded gRNA from the library and one targeting T cell receptor alpha chain—TRAC) and truncated low-affinity nerve growth factor receptor (tLNGFR). 2) Transduced T cells are electroporated with Cas9 to initiate the genetic mutations, allowing for knockout of the gene targeted by the library gRNA and CD3 targeted by the TRAC gRNA. 3) Successfully mutated T cells are negatively selected based loss of CD3 expression using magnetic-activated cell sorting (MACS). 4) Mutated T cells are then positively selected for CD34t to isolate CAR T cells, creating a library of mutant CAR T cells. 5) This library of CAR T cells is then infused back into the patient. 6) After 7-14 days, tumor and blood samples are collected from the patient. The cells are lysed, and the DNA is collected. 7) The DNA is sequenced to identify barcodes of the gRNA expressed by CAR T cells surviving in the tumor or blood, which allows for identification of genes that when knocked out increased CAR T cell survival in these compartments.

[0097] FIGS. 2A-2B show the vector maps for the CAR vector and gRNA vector. FIG. 1A shows a CAR vector comprising a nucleic acid sequence encoding a CD34 truncated (CD34t) selectable marker. FIG. 2B shows a gRNA vector comprising 2 guide RNA cassettes, a suicide gene (iCasp9) operably linked to a PGK promoter, and a low-affinity nerve growth factor receptor truncated (LNGFRt) selectable marker.

[0098] FIGS. 3A-3E show knockout of multiple genes in primary T cells using double guide cassette vector (pMGH354-CP1780) FIG. 3A shows an experimental workflow for production of double-knockout human T cells expressing drug-inducible Caspase-9 (iCasp9) safety switch and truncated LNGFR electroporated with Cas9. FIG. 3B shows a schematic of lentiviral vector introduced into T cells containing sgRNAs targeting the T cell receptor alpha (TRAC) and CD5 genes followed by iCasp9 safety switch and truncated LNGFR for positive selection. FIG. 3C shows flow cytometry data demonstrating knockout of the T cell receptor complex (TCR). FIG. 3D shows flow cytometry data demonstrating knockout of the CD5 using two different sgRNAs. FIG. 3E shows flow cytometry data showing surface expression of truncated LNGFR in cells transduced with the lentiviral vector.

[0099] FIGS. 4A-4C show guide RNA abundance in pooled library determined via sequencing. FIG. 4A shows a schematic of lentiviral vector introduced into T cells containing two sgRNAs followed by drug-inducible Caspase-9 (iCasp9) safety switch and truncated LNGFR. for positive selection. FIG. 4B shows an experimental workflow for production of double-knockout T cells expressing drug-inducible Caspase-9 (iCasp9) safety switch and truncated LNGFR electroporated with Cas9 followed by treatment with Rimducid to induce iCasp9 activation leading to cell death. FIG. 4C shows flow cytometric evaluation of iCasp9 induced cell death by monitoring the loss of CAR+ cells over time.

[0100] FIG. 5 shows a schematic of a CRISPR screen in cancer patients.

[0101] FIG. 6 shows the functional distribution of the 135 genes targeted by the sgRNA CRISPR (Mario) library.

[0102] FIGS. 7A-7D shows construct designs and validation of a gene knockout in human T cell. FIG. 7A shows lentiviral vector designs to be used for in vivo screens. The pCAR vector contains the CAR. The pGuide vector contains a double guide cassette for delivery of two sgRNAs. FIG. 7B shows NGFR reporter expression from the pGuide vector on human T cells. FIG. 7C shows editing efficiency of an example CD5-targeting sgRNA cloned into sgRNA position 1. FIG. 7D shows the editing efficiency of the TRAC-targeting sgRNA cloned into position 2 of the pMario construct.

[0103] FIGS. 8A-8C show generation of the mesothelin CAR T cell with CRISPR (Mario) library for in vivo testing. FIG. 8A shows the construct design to create the CAR-T cells with the CRISPR Mario library. FIG. 8B show a schematic of the mesothelin CAR T cell with CRISPR (Mario) library production process. FIG. 8C shows transduction efficiencies of the two lentiviral vectors before and after selection for CD3-negative cells. The CAR construct is labeled using mCherry while the CRISPR library construct is evaluated using the knockout of CD3.

[0104] FIG. 9 shows a schematic of the experimental design for the in vivo CRISPR screen in mice.

[0105] FIGS. 10A-10B show results of an in vivo loss of function (LOF) CRISPR screen in APSC1 tumor (pancreatic tumor)-bearing mice. FIG. 10A shows the guide distribution comparison showing the ability to capture the full guide library in the tumor-engrafted CAR T cells and spleen-isolated CAR T cells. FIG. 10B shows a hypergeometric test showing enriched and depleted guides in the captured CAR t cells from the tumor and spleen. In addition to RASA2 being depleted and IL2RA being enriched, novel gene targets were identified such as GATA3 and ETS1 that can be of potential importance to CAR T cell functionality.

[0106] FIGS. 11A-11B show guide distribution in large-scale plasmid preparations and transduced human T cells. FIG. 11A shows a histogram plot of guide abundance in the original plasmid primary library stock (blue line) and a large-scale plasmid preparation (orange line) using the PCR products flanking the guide region of the plasmid. FIG. 11B shows guide distribution in human primary T cells transduced with lentiviral vector containing the CRISPR library. Lentiviral vector was prepared using either the original plasmid library stock or the large-scale plasmid preparation before being transduced into human normal donor T cells.

[0107] FIG. 12 shows a proposed manufacturing process for Meso-Mario-CART cells.

[0108] FIG. 13 shows the timeline for the phase I study of the Meso-Mario-CAR-T cells in human patients.

[0109] FIG. 14 shows the sample collection and analysis plan for the phase I study of the Meso-Mario-CAR-T cells in human patients.

[0110] FIG. 15 shows a construct schematic of the used BCMA CAR (4-1BB costimulatory domain, CD34t transduction marker) and the double guide cassette (LNGFR marker)

[0111] FIG. 16 shows the BCMA CAR-T CRISPR screen experimental design. After 21 days of engraftment with 1E6 MM1.s tumor cells, mice are treated with 2E6 double-transduced BCMA+library construct. On day 7, mice are sacrificed, and bone marrow (spine, femur, tibia) is harvested as part of collecting the BCMA CAR-T CRISPR cells.

[0112] FIG. 17 shows measurements of tumor killing activity of a BCMA CAR-T cell and the BCMA CAR-T Cell CRISPR library with normal donor 216 T cells, until day 7. Body luminescence imaging (BLI), both by group (left) and single mice. BCMA CAR and double-transduced BCMA+library construct show antitumor activity, while tumor only and library only are not able to control the tumor.

[0113] FIG. 18 shows expression using STARS scoring STARS rank scoring, allowing for quantification of significant enriched (highest IL2RA) and depleted hits (highest IRF4).

[0114] FIGS. 19A-19B shows enriched and deleted gene knockout in the BCMA CAR-T CRISPR screen. FIG. 19A shows the STARS scoring rank per mice assessment, enriched. From STARS scoring, identifying enriched gene hit that are inside of the top 10 enriched genes in 6 mice or more. For example, IL2RA is inside the top10 enriched hits in all 15 tested mice. FIG. 19B shows the STARS scoring rank per mice assessment, depleted. From STARS scoring, identifying enriched gene hit that are inside of the top 10 enriched genes in 6 mice or more. Example: IRF4 and RASA are inside the top10 depleted hits in all 15 tested mice

[0115] FIGS. 20A-20F show results from a BCMA CRISPR CAR-T Screen and determining the period for selection. FIG. 20A shows the BCMA repeat screen experimental design. Analog to FIG. 16, screen is repeated with two other healthy donor T cells. FIG. 20B shows tumor activity measurements, T cells of normal donors 106 and 99, until day 21 BLI, both by group (left) and single mice. BCMA CAR and double-transduced BCMA+library construct show effective and rapid tumor clearance, while tumor only and library only are not able to control the tumor. FIG. 20C shows expression using STARS scoring, measuring day 0 to day 7. Analog to FIG. 18, displaying STARS rank scoring in the other two normal donor T cells, from day 0 to day 7 (in vivo period). The highest enriched CAR-T cell gene CRISPR targets was IL2RA, and the highest depleted was IRF4-both consistent with results from first ND (see FIG. 18). FIG. 20D shows expression using STARS scoring, measuring day 0 to day 21. Analog to FIG. 18, displaying STARS scoring in the other two normal donor T cells, from day 0 to day 21 (in vivo period). Highest enriched CAR-T cell gene CRISPR target was IL2RA, and the highest depleted was STAT3. FIG. 20E shows expression using STARS scoring, measuring day-11 to day 21. Analog to FIG. 18, displaying STARS scoring in the other two normal donor T cells, from day-11 to day 21 (in vitro & in vivo period). Highest enriched CAR-T cell gene CRISPR target was CDKN1B, and the highest depleted was IL2RA. FIG. 20F shows expression using STARS scoring, measuring day-11 to day 7. Highest enriched gene CRISPR targets were PTPN2 and SOCS1, and the highest depleted was IRF4.

[0116] FIGS. 21A-21C show production of a current good manufacturing practice cGMP gRNA plasmid library. FIG. 21A shows a first attempt at making the library and resulting low yields and low quality DNA that is not sufficient to produce a cGMP gRNA plasmid library. FIG. 21B shows that increasing antibiotic amount (by two fold or four fold) used cGMP library preparation increases gRNA plasmid library yields. FIG. 21C shows that increasing antibiotic amount produces a gRNA plasmid library of expected yield and quality as determined by restriction digest.

### DETAILED DESCRIPTION

[0117] A general challenge in cell therapy (e.g., CAR-T cell therapy) is identifying CAR-T cell modifications (e.g., gene mutations) that improve cell therapy efficacy. This is challenging for a few different reasons. First, while CAR-T cell efficacy in vitro and in mice can inform in human efficacy, CAR-T cells may have different efficacies in humans than in vitro or in mice. Second, predicting how a given mutation (e.g., a loss of function mutation) will affect CAR-T cell efficacy in humans may be difficult, so many mutations may need to be tested to identify a mutation that improves CAR-T cancer killing efficacy. However, individually testing many different modified CAR-T cells in humans is impractical. Third, different subjects may respond differently to different CAR-T cell modifications. For example, a first modified CAR-T cell may have higher efficacy in a first subject but lower efficacy in a second subject compared to a second modified CAR-T cell. In some aspects, this disclosure describes methods and compositions for addressing these challenges. For example, this disclosure describes methods and compositions for screening a library of modified CAR-T cells in vivo (e.g., in humans) in a single experiment to identify CAR-T cell modifications that increase CAR-T cell efficacy (e.g., persistence in vivo).

### General Definitions

[0118] The terms “decrease,” “reduced,” “reduction,” or “inhibit” are all used herein to mean a decrease by a statistically significant amount. In some embodiments, “reduce,” “reduction,” or “decrease” or “inhibit” typically means a decrease by at least 10% as compared to a reference level (e.g., the absence of a given treatment or agent) and can include, for example, a decrease by at least about 10%, at least about 20%, at least about 25%, at least about 30%, at least about 35%, at least about 40%, at least about 45%, at least about 50%, at least about 55%, at least about 60%, at least about 65%, at least about 70%, at least about 75%, at least about 80%, at least about 85%, at least about 90%, at least about 95%, at least about 98%, at least about 99%, or more. “Complete inhibition” is a 100% inhibition as compared to a reference level. Where applicable, a decrease can be preferably down to a level accepted as within the range of normal for an individual without a given disorder. The terms “increased,” “increase,” “enhance,” or “activate” are all used herein to mean an increase by a statically significant amount. In some embodiments, the terms “increased,” “increase,” “enhance,” or “activate” can mean an increase of at least 10% as compared to a reference level, for example, an increase of at least about 20%, or at least about 30%, or at least about 40%, or at least about 50%, or at least about 60%, or at least about 70%, or at least about 80%, or at least about 90% or up to and including a 100% increase or any increase between 10-100% as compared to a reference level, or at least about a 2-fold, or at least about a 3-fold, or at least about a 4-fold, or at least about a 5-fold or at least about a 10-fold increase, or any increase between 2-fold and 10-fold or greater as compared to a reference level. In the context of a marker or symptom, an “increase” is a statistically significant increase in such level.

[0119] A “disease” is a state of health of an animal, for example, a human, wherein the animal cannot maintain homeostasis, and wherein if the disease is not ameliorated, then the animal's health continues to deteriorate. In contrast, a “disorder” in an animal is a state of health in which the animal is able to maintain homeostasis, but in which the animal's state of health is less favorable than it would be in the absence of the disorder. Left untreated, a disorder does not necessarily cause a further decrease in the animal's state of health. In some embodiments, the disease is a cancer or a tumor.

[0120] As used herein, the terms “tumor antigen”, “tumor-associated antigen” and “cancer antigen” are used interchangeably to refer to antigens that are differentially expressed by cancer cells and can thereby be exploited in order to target cancer cells. Cancer antigens are antigens that can potentially stimulate apparently tumor-specific immune responses. Some of these antigens are encoded, although not necessarily expressed, by normal cells. These antigens can be characterized as those which are normally silent (i.e., not expressed) in normal cells, those that are expressed only at certain stages of differentiation and those that are temporally expressed such as embryonic and fetal antigens. Other cancer antigens are encoded by mutant cellular genes, such as oncogenes (e.g., activated ras oncogene), suppressor genes (e.g., mutant p53), and fusion proteins resulting from internal deletions or chromosomal translocations. Still other cancer antigens can be encoded by viral genes such as those carried on RNA and DNA tumor viruses. Many tumor antigens have been defined in terms of multiple solid tumors: MAGE 1, 2, & 3, defined by immunity; MART-1/Melan-A, gp100, carcinoembryonic antigen (CEA), human epidermal growth factor receptor (HER2), mucins (i.e., MUC-1), prostate-specific antigen (PSA), and prostatic acid phosphatase (PAP). In addition, viral proteins such as some encoded by hepatitis B (HBV), Epstein-Barr (EBV), and human papilloma (HPV) have been shown to be important in the development of hepatocellular carcinoma, lymphoma, and cervical cancer, respectively. In some embodiments, the tumor-associated antigen is any one of CD19, CD79b, TACI, BCMA, MUC1, MUC16, B7H3, mesothelin, CD70, PSMA, PSCA, EGFRVIII, claudin6, or any pair of CD19/CD79b, or BCMA/TACI.

[0121] As used herein, the term “chimeric” refers to the product of the fusion of portions of at least two or more different polynucleotide molecules. In some embodiments, the term “chimeric” refers to a gene expression element produced through the manipulation of known elements or other polynucleotide molecules.

[0122] In some embodiments, “activation” can refer to the state of a T cell that has been sufficiently stimulated to induce detectable cellular proliferation. In some embodiments, activation can refer to induced cytokine production. In other embodiments, activation can refer to detectable effector functions.

[0123] At a minimum, an “activated T cell” as used herein is a proliferative T cell.

[0124] As used herein, the terms “specific binding” and “specifically binds” refer to a physical interaction between two molecules, compounds, cells and/or particles wherein the first entity binds to the second, target, entity with greater specificity and affinity than it binds to a third entity which is a non-target. In some embodiments, specific binding can refer to an affinity of the first entity for the second target, entity, which is at least 10 times, at least 50 times, at least 100 times, at least 500 times, at least 1000 times or more greater than the affinity for the third non-target entity under the same conditions. A reagent specific for a given target is one that exhibits specific binding for that target under the conditions of the assay being utilized. A non-limiting example includes an antibody, or a ligand, which recognizes and binds with a cognate binding partner (for example, a stimulatory and/or costimulatory molecule present on a T cell) protein.

[0125] A “stimulatory ligand,” as used herein, refers to a ligand that when present on an antigen presenting cell (APC) (e.g., a macrophage, a dendritic cell, a B-cell, an artificial APC, and the like) can specifically bind with a cognate binding partner (referred to herein as a “stimulatory molecule” or “costimulatory molecule”) on a T cell, thereby mediating a primary response by the T cell, including, but not limited to, proliferation, activation, initiation of an immune response, and the like. Stimulatory ligands are well-known in the art and encompass, inter alia, an MHC Class I molecule loaded with a peptide, an anti-CD3 antibody, a superagonist anti-CD28 antibody, and a superagonist anti-CD2 antibody.

[0126] A “stimulatory molecule,” as the term is used herein, means a molecule on a T cell that

specifically binds with a cognate stimulatory ligand present on an antigen presenting cell. “Co-stimulatory ligand,” as the term is used herein, includes a molecule on an APC that specifically binds a cognate co-stimulatory molecule on a T cell, thereby providing a signal which, in addition to the primary signal provided by, for instance, binding of a TCR/CD3 complex with an MHC molecule loaded with peptide, mediates a T cell response, including, but not limited to, proliferation, activation, differentiation, and the like. A co-stimulatory ligand can include, but is not limited to, 4-1BBL, OX40L, CD7, B7-1 (CD80), B7-2 (CD86), PD-L1, PD-L2, inducible co-stimulatory ligand (ICOS-L), intercellular adhesion molecule (ICAM), CD30L, CD40, CD70, CD83, HLA-G, MICA, MICB, HVEM, lymphotoxin beta receptor, 3/TR6, IL T3, IL T4, HVEM, an agonist or antibody that binds Toll-like receptor and a ligand that specifically binds with B7-H3. A co-stimulatory ligand also can include, but is not limited to, an antibody that specifically binds with a co-stimulatory molecule present on a T cell, such as, but not limited to, CD27, CD28, 4-1BB, OX40, CD30, CD40, PD-1, ICOS, lymphocyte function-associated antigen-1 (LFA-1), CD2, CD7, LIGHT, NKG2C, B7-H3, and a ligand that specifically binds with CD83.

[0127] A “co-stimulatory molecule” refers to the cognate binding partner on a T cell that specifically binds with a co-stimulatory ligand, thereby mediating a co-stimulatory response by the T cell, such as, but not limited to, proliferation. Co-stimulatory molecules include but are not limited to an MHC class I molecule, BTLA, a Toll-like receptor, CD27, CD28, 4-1BB, OX40, CD30, CD40, PD-1, ICOS, lymphocyte function associated antigen-1 (LFA-1), CD2, CD7, LIGHT, NKG2C, B7-H3, and CD83.

[0128] In some embodiments, the term “engineered” and its grammatical equivalents as used herein can refer to one or more human-designed alterations of a nucleic acid, e.g., the nucleic acid within an organism's genome. In another embodiment, engineered can refer to alterations, additions, and/or deletion of genes. An “engineered cell” can refer to a cell with an added, deleted and/or altered gene.

[0129] The term “cell” or “engineered cell” and their grammatical equivalents as used herein can refer to a cell of human or non-human animal origin.

[0130] As used herein, the term “operably linked” refers to a first polynucleotide molecule, such as a promoter, connected with a second transcribable polynucleotide molecule, such as a gene of interest, where the polynucleotide molecules are so arranged that the first polynucleotide molecule affects the function of the second polynucleotide molecule. The two polynucleotide molecules may or may not be part of a single contiguous polynucleotide molecule and may or may not be adjacent. For example, a promoter is operably linked to a gene of interest if the promoter regulates or mediates transcription of the gene of interest in a cell.

[0131] In the various embodiments described herein, it is further contemplated that variants (naturally occurring or otherwise), alleles, homologs, conservatively modified variants, and/or conservative substitution variants of any of the particular polypeptides described are encompassed. As to amino acid sequences, one of ordinary skill will recognize that individual substitutions, deletions or additions to a nucleic acid, peptide, polypeptide, or protein sequence which alters a single amino acid or a small percentage of amino acids in the encoded sequence is a “conservatively modified variant” where the alteration results in the substitution of an amino acid with a chemically similar amino acid and retains the desired activity of the polypeptide. Such conservatively modified variants are in addition to and do not exclude polymorphic variants, interspecies homologs, and alleles consistent with the disclosure.

[0132] A given amino acid can be replaced by a residue having similar physiochemical characteristics, e.g., substituting one aliphatic residue for another (such as lie, Val, Leu, or Ala for one another), or substitution of one polar residue for another (such as between Lys and Arg; Glu and Asp; or Gin and Asn). Other such conservative substitutions, e.g., substitutions of entire regions having similar hydrophobicity characteristics, are well known. Polypeptides comprising conservative amino acid substitutions can be tested in any one of the assays described herein to confirm that a desired activity, e.g., ligand-mediated receptor activity and specificity of a native or reference polypeptide is retained. Amino acids can be grouped according to similarities in the properties of their side chains (in A. L. Lehninger, in Biochemistry, second ed., pp. 73-75, Worth Publishers, New York (1975)): (1) non-polar: Ala (A), Val (V), Leu (L), Ile (I), Pro (P), Phe (F), Trp (W), Met (M); (2) uncharged polar: Gly (G), Ser(S), Thr (T), Cys (C), Tyr (Y), Asn (N), Gln (Q); (3) acidic: Asp (D), Glu (E); (4) basic: Lys (K), Arg (R), His (H). Alternatively, naturally occurring residues can be divided into groups based on common side-chain properties: (1) hydrophobic: Norleucine, Met, Ala, Val, Leu, Ile; (2) neutral hydrophilic: Cys, Ser, Thr, Asn, Gln; (3) acidic: Asp, Glu; (4) basic: His, Lys, Arg; (5) residues that influence chain orientation: Gly, Pro; (6) aromatic: Trp, Tyr, Phe. Non-conservative substitutions will entail exchanging a member of one of these classes for another class. Particular conservative substitutions include, for example; Ala into Gly or into Ser; Arg into Lys; Asn into Gln or into His; Asp into Glu; Cys into Ser; Gln into Asn; Glu into Asp; Gly into Ala or into Pro; His into Asn or into Gln; ile into Leu or into Val; Leu into ile or into Val; Lys into Arg, into Gln or into Glu; Met into Leu, into Tyr or into Ile; Phe into Met, into Leu or into Tyr; Ser into Thr; Thr into Ser; Trp into Tyr; Tyr into Trp; and/or Phe into Val, into Ile or into Leu.

[0133] In some embodiments, a polypeptide described herein (or a nucleic acid encoding such a

polypeptide) can be a functional fragment of one of the amino acid sequences described herein. As used herein, a “functional fragment” is a fragment or segment of a peptide that retains at least 50% of the wildtype reference polypeptide's activity according to an assay known in the art or described below herein. A functional fragment can comprise conservative substitutions of the sequences disclosed herein.

[0134] In some embodiments, a polypeptide described herein can be a variant of a polypeptide or molecule as described herein. In some embodiments, the variant is a conservatively modified variant. Conservative substitution variants can be obtained by mutations of native nucleotide sequences, for example. A “variant,” as referred to herein, is a polypeptide substantially homologous to a native or reference polypeptide, but which has an amino acid sequence different from that of the native or reference polypeptide because of one or a plurality of deletions, insertions, or substitutions. Variant polypeptide-encoding DNA sequences encompass sequences that comprise one or more additions, deletions, or substitutions of nucleotides when compared to a native or reference DNA sequence, but that encode a variant protein or fragment thereof that retains activity of the non-variant polypeptide. A wide variety of PCR-based site-specific mutagenesis approaches are known in the art and can be applied by the ordinarily skilled artisan.

[0135] A variant amino acid or DNA sequence can be at least 80%, at least 85%, at least 90%, at least 91%, at least 92%, at least 93%, at least 94%, at least 95%, at least 96%, at least 97%, at least 98%, at least 99%, or more, identical to a native or reference sequence. The degree of homology (percent identity) between a native and a mutant sequence can be determined, for example, by comparing the two sequences using freely available computer programs commonly employed for this purpose on the world wide web (e.g., BLASTp or BLASTn with default settings).

[0136] Alterations of the native amino acid sequence can be accomplished by any of a number of techniques known to one of skill in the art. Mutations can be introduced, for example, at particular loci by synthesizing oligonucleotides containing a mutant sequence, flanked by restriction sites permitting ligation to fragments of the native sequence. Following ligation, the resulting reconstructed sequence encodes an analog having the desired amino acid insertion, substitution, or deletion. Alternatively, oligonucleotide directed site-specific mutagenesis procedures can be employed to provide an altered nucleotide sequence having particular codons altered according to the substitution, deletion, or insertion required. Techniques for making such alterations are well established and include, for example, those disclosed by Walder et al. (Gene 42:133, 1986); Bauer et al. (Gene 37:73, 1985); Craik (BioTechniques, January 1985, 12-19); Smith et al. (Genetic Engineering: Principles and Methods, Plenum Press, 1981); and U.S. Pat. Nos. 4,518,584 and 4,737,462, which are herein incorporated by reference in their entireties. Any cysteine residue not involved in maintaining the proper conformation of a polypeptide also can be substituted, generally with serine, to improve the oxidative stability of the molecule and prevent aberrant crosslinking. Conversely, cysteine bond(s) can be added to a polypeptide to improve its stability or facilitate oligomerization.

[0137] The term “polynucleotide” is used herein interchangeably with “nucleic acid molecule” to indicate a polymer of nucleosides. Typically, a polynucleotide is composed of nucleosides that are naturally found in DNA or RNA (e.g., adenosine, thymidine, guanosine, cytidine, uridine, deoxyadenosine, deoxythymidine, deoxyguanosine, and deoxycytidine) joined by phosphodiester bonds. However, the term encompasses molecules comprising nucleosides or nucleoside analogs containing chemically or biologically modified bases, modified backbones, etc., whether or not found in naturally occurring nucleic acids, and such molecules may be preferred for certain applications. Where this application refers to a polynucleotide it is understood that both DNA, RNA, and in each case both single- and double-stranded forms (and complements of each single-stranded molecule) are provided. “Polynucleotide sequence” as used herein can refer to the polynucleotide material itself and/or to the sequence information (i.e., the succession of letters used as abbreviations for bases) that biochemically characterizes a specific nucleic acid. In some embodiments, the nucleic acid molecule is a heterologous nucleic acid molecule. As used herein the term, “heterologous nucleic acid molecule” refers to a nucleic acid molecule that does not naturally exist within a given cell.

[0138] A polynucleotide sequence presented herein is presented in a 5′ to 3′ direction unless otherwise indicated.

[0139] The term “polypeptide” as used herein refers to a polymer of amino acids. The terms “protein” and “polypeptide” are used interchangeably herein. A peptide may be a relatively short polypeptide, typically between about 2 and 60 amino acids in length. Polypeptides used herein typically contain amino acids such as the 20 L-amino acids that are most commonly found in proteins. However, other amino acids and/or amino acid analogs known in the art can be used. One or more of the amino acids in a polypeptide may be modified, for example, by the addition of a chemical entity such as a carbohydrate group, a phosphate group, a fatty acid group, a linker for conjugation, functionalization, etc. A polypeptide that has a nonpolypeptide moiety covalently or noncovalently associated therewith is still considered a “polypeptide.” Exemplary modifications include glycosylation and palmitoylation. Polypeptides can be purified from natural sources, produced using recombinant DNA technology or synthesized through chemical means such as conventional solid phase peptide synthesis, etc. The term “polypeptide sequence” or “amino acid sequence” as used herein can refer to the polypeptide material itself and/or to the sequence information (i.e., the succession of letters or three letter codes used as abbreviations for amino acid names) that biochemically characterizes a polypeptide. A polypeptide sequence presented herein is presented in an N-terminal to C-terminal direction unless otherwise indicated.

[0140] The term “gene” may refer to a nucleic acid sequence which is transcribed (DNA) to RNA in vitro or in vivo when operably linked to appropriate regulatory sequences. The gene may or may not include regions preceding and following the coding region, e.g., 5′ untranslated (5′ UTR) or “leader” sequences and 3′ UTR or “trailer” sequences, as well as intervening sequences (intrans) between individual coding segments (exons). In some embodiments, a nucleic acid encoding a polypeptide as described herein (e.g., a CAR polypeptide) is comprised by a vector (e.g., a CAR vector). In some of the aspects described herein, a nucleic acid sequence encoding a given polypeptide as described herein, or any module thereof, is operably linked to a vector. The term “vector,” as used herein, refers to a nucleic acid construct designed for delivery to a host cell or for transfer between different host cells. As used herein, a vector can be viral or non-viral. The term “vector” encompasses any genetic element that is capable of replication when associated with the proper control elements and that can transfer gene sequences to cells. A vector can include, but is not limited to, a cloning vector, an expression vector, a plasmid, phage, transposon, cosmid, artificial chromosome, virus, virion, etc.

[0141] As used herein, the term “expression vector” may refer to a vector that directs expression of an RNA or polypeptide from sequences linked to transcriptional regulatory sequences on the vector. The sequences expressed will often, but not necessarily, be heterologous to the cell. An expression vector may comprise additional elements, for example, the expression vector may have two replication systems, thus allowing it to be maintained in two organisms, for example, in human cells for expression and in a prokaryotic host for cloning and amplification. The term “expression” refers to the cellular processes involved in producing RNA and proteins and as appropriate, secreting proteins, including where applicable, but not limited to, for example, transcription, transcript processing, translation and protein folding, modification and processing. “Expression products” include RNA transcribed from a gene, and polypeptides obtained by translation of mRNA transcribed from a gene.

[0142] As used herein, the term “viral vector” may refer to a nucleic acid vector construct that includes at least one element of viral origin and has the capacity to be packaged into a viral vector particle. The viral vector can contain a nucleic acid encoding a polypeptide as described herein in place of non-essential viral genes. The vector and/or particle may be utilized for the purpose of transferring nucleic acids into cells either in vitro or in vivo. Numerous forms of viral vectors are known in the art.

[0143] By “recombinant vector” may be a vector that includes a heterologous nucleic acid sequence or “transgene” that is capable of expression in vivo. It should be understood that the vectors described herein can, in some embodiments, be combined with other suitable compositions and therapies. In some embodiments, the vector is episomal. The use of a suitable episomal vector provides a means of maintaining the nucleotide of interest in the subject in high copy number extra-chromosomal DNA thereby eliminating potential effects of chromosomal integration.

[0144] As used herein, a “signal peptide” or “signal sequence” refers to a peptide at the N-terminus of a newly synthesized protein that serves to direct a nascent protein into the endoplasmic reticulum. In some embodiments, the signal peptide is a CD8 or lgK signal peptide.

[0145] As used herein the term “clustered regularly interspaced short palindromic repeats” or “CRISPR” may refer to a gene editing system that comprises a guide RNA component and a CRISPR associated (Cas) protein component. The guide RNA polynucleotide may comprise a homology region that is complementary to a target gene and a stem loop region that is capable of binding to a Cas protein. The Cas protein may comprise a guide RNA binding site and nuclease activity. The Cas protein and the guide RNA may for a complex that is capable of binding to the target gene (based on the homology region), and cleaving the DNA (using the nuclease activity of the Cas protein). In some embodiments, the Cas protein guide RNA complex binds to sequence that is adjacent to and downstream of a protospacer adjacent motif (PAM). Cleavage results in a DNA strand break and repair of that strand break may introduce a mutation (e.g., single nucleotide polymorphism, insertion, or deletion). In some embodiments, the Cas protein is any suitable Cas protein for mutating and/or altering the expression of a target gene (a Cas protein may also be referred to as a CRISPR protein herein). In some embodiments, the Cas protein is selected from the group consisting of a Cas9 protein, a Cas12 protein, or a Cas13 protein. The skilled person will understand that Cas proteins (e.g., Cas9) may have many different orthologs (e.g., SpyoCas9, spCas9, spyCas9, and geoCas9). In some embodiments, the Cas protein is SpyoCas9. Cas proteins and orthologs thereof are well known in the art as discussed in Gasiunas, Giedrius, et al, Nature communications 11.1 (2020): 1-10; and Fancheng Y et al., Cell Biology and Toxicology 35.6 (2019): 489-492, each of which is incorporated by reference in its entirety. Methods for designing guide RNAs (e.g., selecting homology region sequences for targeting a specific gene) are also well known in the art as described in Liu, Guanqing L. et al., Computational and Structural Biotechnology Journal 18 (2020): 35-44, which is incorporated by reference in its entirety. In some embodiments, gRNAs (encoded by gRNA polynucleotides) are designed using CRISPick (portals.broadinstitute.org/gppx/crispick/public), which performs as described in Doench et al., Nature Biotechnology, 34 (2), 184-191 (2016) and Sanson et al., Nature Communications, 9 (1), 5416 (2018), both of which are incorporated by reference in their entirety.

[0146] In some embodiments, a polypeptide, polynucleotide, plasmid and or/vector as described herein optionally further comprises a reporter molecule, e.g., to determine if the vector is properly expressed in a cell. In some embodiments, the reporter molecule may be a fluorescent protein (e.g., GFP, YFP, RF), antibody (e.g., CD34, tEGFR, tCD19, tCD20, tCD34, and tHer2), and a radioisotope. In some embodiments, the reporter molecule is hygromycin phosphotransferase (hph) that can be imaged alone or in combination with a substrate or chemical (for example 9-[4-[18F]fluoro-3-(hydroxymethyl)butyl]guanine ([18F]FHBG)).

[0147] In some embodiments, GFP and mCherry may be used as fluorescent tags for imaging a CAR expressed on a T cell (e.g., a CAR-T cell). It is expected that essentially any fluorescent protein known in the art can be used as a fluorescent tag for this purpose. For clinical applications, the CAR need not include a fluorescent tag or fluorescent protein. In each instance of particular constructs provided herein, therefore, any markers present in the constructs can be removed. The invention includes the constructs with or without the markers. Accordingly, when a specific construct is referenced herein, it can be considered with or without any markers or tags (including, e.g., histidine tags, such as the histidine tag of HHHHHH (SEQ ID NO: 1370)) as being included within the invention.

[0148] The term “statistically significant” or “significantly” refers to statistical significance and generally means a two standard deviation (2 SD) or greater difference.

[0149] Other than in the operating examples, or where otherwise indicated, all numbers expressing quantities of ingredients or reaction conditions used herein should be understood as modified in all instances by the term “about.”

[0150] The terms “about” or “approximately” when used in connection with a value can mean that the value or a statement reciting the value encompasses a range within ±1%, ±2%, ±3%, ±4%, ±5%, ±6%, ±7%, ±8%, ±9%, ±10%, ±1-5%, ±2-7%, ±3-8%, ±4-9%, or ±5-10% of the value.

[0151] The singular terms “a,” “an,” and “the” include plural referents unless context clearly indicates otherwise. Similarly, the word “or” is intended to include “and” unless the context clearly indicates otherwise. Although methods and materials similar or equivalent to those described herein can be used in the practice or testing of this disclosure, suitable methods and materials are described below. The abbreviation, “e.g.” is derived from the Latin exempli gratia, and is used herein to indicate a non-limiting example. Thus, the abbreviation “e.g.” is synonymous with the term “for example.”

[0152] Other terms are defined within the description of the various aspects and embodiments of the technology, as set forth herein.

### Guide RNA Polynucleotide Library

[0153] As used herein, the term “guide RNA (gRNA) polynucleotide” refers to a DNA or a RNA polynucleotide that encodes a guide RNA (gRNA). A guide RNA polynucleotide comprises a sequence that binds to a clustered regularly interspaced short palindromic repeats (CRISPR) protein or CRISPR-related protein and a sequence and comprises an additional sequence that is complementary to a target polynucleotide (i.e., a homology region). For example, a guide RNA polynucleotide may be a Cas9 protein guide RNA polynucleotide or a Cas12 protein guide RNA polynucleotide. Cas9 protein guide RNAs are compatible with Cas9 CRISPR proteins and are well known in the art e.g., as described in Adli et. al., Nature communications 9.1 (2018): 1-13, which is incorporated by reference in its entirety. Cas12 protein guide RNA polynucleotides are compatible with Cas12 CRISPR proteins and are well known in the art e.g., as described in Zetsche et al., Cell 163.3 (2015): 759-771, which is incorporated by reference in its entirety. In some embodiments, a guide RNA polynucleotide is a base editor guide RNA polynucleotide. In some embodiments, the gRNA is a prime editing guide RNA polynucleotide. In some embodiments, a guide RNA polynucleotide encodes a homology region (e.g., spacer) and a region that binds to a CRISPR protein (e.g., a direct repeat). In some embodiments, the guide RNA polynucleotide is a single guide RNA polynucleotide comprising a homology region and a region that binds to a CRISPR protein.

[0154] In some embodiments, the homology region comprises a sequential series of about 10-30 or about 15-25 nucleotides. In some embodiments, the homology region comprises about 20 nucleotides. In some embodiments, the homology region is complementary to a target gene (e.g., a gene associated with immune cell function). In some embodiments, the gRNAs are designed using an algorithm (e.g., CRISPick). CRISPick is described in Kim et al., Nat Biotechnology 36, 239-241 (2018); Doench et al. Nature Biotechnology, 34 (2), 184-191 (2016); and Sanson et al., Nature Communications, 9 (1), 5416 (2018), each of which are incorporated by reference in their entirety.

[0155] In some embodiments, the gRNA polynucleotides are not cross-reactive or minimally cross-reactive. Cross-reactive gRNA polynucleotides refer to guide RNA polynucleotides comprising homology regions having sufficient complementarity with more than one target polynucleotide (e.g., gene sequence) such that the gRNA may induce a CRISPR mutation in more than one target polynucleotide. Design algorithms may be used in guide RNA polynucleotide design to decrease the chances of cross-reactivity (e.g., gRNAs may be scored for on-target activity using Rule Set 3 (RS3) with sequence and target information and the Chen2013 tracr (Chen, Baohui, et al. Cell 155.7 (2013): 1479-1491). gRNAs may also be scored for off-target activity using Tier-agnostic 1 mismatch aggregated Cutting Frequency Determination (CFD) scores). The skilled person will understand the gRNA polynucleotides designed with such an algorithm may still have some degree of cross-reactivity, however, the risk of cross reactivity is expected to be decreased or may be specified at a selected threshold in the algorithm. In some embodiments, cross reactivity is a function of complementarity. In some embodiments, gRNA polynucleotides that are not cross-reactive do not have greater than 80% complementarity to more than 1 gene. In some embodiments, gRNA polynucleotides that are not cross-reactive do not have greater than 85% complementarity to more than 1 gene. In some embodiments, gRNA polynucleotides that are not cross-reactive do not have greater than 90% complementarity to more than 1 gene. In some embodiments, gRNA polynucleotides that are not cross-reactive do not have greater than 95% complementarity to more than 1 gene.

[0156] The term “complementary” as described herein refers to the degree of Watson-Crick base pairing between two polynucleotides. For example, two polynucleotides may be 90% complementary if 9/10 nucleotides of each of the polynucleotides form a Watson Crick base pair. In some embodiments, complementary may refer to at least 70% (e.g., at least 70%, at least 80%, at least 90%, at least 95%, or at least 99%) of nucleotides in a first polynucleotide Watson-Crick base pairing with a second polynucleotide. In some embodiments, a homology region of a gRNA is complementary to a gene sequence when the homology region is capable of hybridizing to the gene sequence and at least a threshold percentage (e.g., at least 70% (e.g., at least 70%, at least 80%, at least 90%, at least 95%, or at least 99%) of nucleotides are Watson Crick base pairs to the gene sequence. In some embodiments, a homology region is complementary to a gene sequence when the homology region is capable of hybridizing to the gene sequence and initiating cleavage of the gene sequence by a CRISPR protein and at least a threshold percentage (e.g., at least 70% (e.g., at least 70%, at least 80%, at least 90%, at least 95%, or at least 99%) of nucleotides are Watson Crick base pairs to the gene sequence. In some embodiments, a homology region is complementary to a target gene sequence when the nucleotides of the homology region are 100% complementary to a sequential portion of the target gene sequence (e.g., 10, 11, 12, 13, 14, 15, 16, 17, 18, 19, 20, 21, 22, 23, 24, 25, 26, 27, 28, 29, or 30 sequential nucleotides of the target gene sequence, e.g., 20 sequential nucleotides). In some embodiments, the homology region is complementary to the sense strand of the target gene sequence. In some embodiments, the homology region is complementary to the anti-sense strand of the target gene sequence. In some embodiments, a homology region that is complementary to a gene encoded by a sequence (e.g., SEQ ID NO: 1) may refer to a homology region that is complementary to either the sense strand of the gene sequence (e.g., SEQ ID NO: 1) or the antisense strand of the gene sequence (e.g., the reverse compliment of SEQ ID NO: 1). For example, a homology region described herein may be complementary to any one of SEQ ID NOs: 1-135 (i.e. a sense strands) or the reverse complement of any one of SEQ ID NOs: 1-135 (i.e., antisense strands).

[0157] In some embodiments, the homology region is complementary to a region of the target gene sequence this is adjacent to a protospacer adjacent motif (PAM). In some embodiments, the homology region is complementary to a region of the target gene sequence that is downstream of and adjacent to a protospacer adjacent motif (PAM).

[0158] In some embodiments, this disclosure describes a composition comprising a plurality of guide RNA (gRNA) polynucleotides, wherein at least 2 (e.g., at least 3, at least 5, at least 10, at least 15, at least 25, at least 50, at least 75, at least 100, or at least 135) gRNA polynucleotides each comprise a homology region that is complementary to a sense strand or an antisense strand of a different gene encoded by a sequence of any one of SEQ ID NOs: 1-135 or a variant thereof.

[0159] In some embodiments, this disclosure describes a composition comprising a plurality of guide RNA (gRNA) polynucleotides, wherein at least 2 (e.g., at least 3, at least 5, at least 10, at least 15, at least 25, at least 50, at least 75, at least 100, or at least 135) gRNA polynucleotides each comprise a homology region that is complementary to a sense strand or an antisense strand of a different gene sequence of any one of SEQ ID NOs: 1-135 or a variant thereof.

[0160] In some embodiments, this disclosure describes a composition comprising a plurality of guide RNA (gRNA) polynucleotides, wherein at least 2 (e.g., at least 3, at least 5, at least 10, at least 15, at least 25, at least 50, at least 75, at least 100, or at least 135) gRNA polynucleotides each comprise a homology region that is complementary to a different gene sequence of any one of SEQ ID NOs: 1-135 or a variant thereof, or wherein the at least 2 (e.g., at least 3, at least 5, at least 10, at least 15, at least 25, at least 50, at least 75, at least 100, or at least 135) gRNA polynucleotides each comprise a homology region that is complementary to a different gene sequence selected from a reverse complement of any one of SEQ ID NOs: 1-135.

[0161] In some embodiments, the instant disclosure describes a compositions comprising a plurality of guide RNA (gRNA) polynucleotides. In some embodiments, at least 2 gRNA polynucleotides e.g., each comprise a homology region complementary to a different gene sequence of any one of SEQ ID NOs: 1-135 or a variant thereof. For example, a plurality of guide RNA (gRNA) polynucleotides can comprise a first gRNA polynucleotide and a second gRNA polynucleotide, wherein the first gRNA polynucleotide and the second gRNA polynucleotide are each complementary to a different gene sequence of any one of SEQ ID NOs: 1-135 or a variant thereof. In some embodiments, each homology region of the at least 2 gRNA polynucleotides is complementary to a sense strand of a different gene sequence of any one of SEQ ID NOs: 1-135 or a variant thereof. In some embodiments, each homology region of the at least 2 gRNA polynucleotides is complementary to an antisense strand of a different gene sequence of any one of SEQ ID NOs: 1-135 or a variant thereof.

[0162] In some embodiments, the composition comprises at least 2 gRNA polynucleotides, wherein each gRNA polynucleotide comprises a homology region complementary to a different gene sequence of any one of SEQ ID NOs: 1-135, or a variant thereof. In some embodiments, the composition comprises at least 3 gRNA polynucleotides, wherein each gRNA polynucleotide comprises a homology region complementary to a different gene sequence of any one of SEQ ID NOs: 1-135, or a variant thereof. In some embodiments, the composition comprises at least 4 gRNA polynucleotides, wherein each gRNA polynucleotide comprises a homology region complementary to a different gene sequence of any one of SEQ ID NOs: 1-135, or a variant thereof. In some embodiments, the composition comprises at least 5 gRNA polynucleotides. In some embodiments, the composition comprises at least 6 gRNA polynucleotides, wherein each gRNA polynucleotide comprises a homology region complementary to a different gene sequence of any one of SEQ ID NOs: 1-135, or a variant thereof. In some embodiments, the composition comprises at least 7 gRNA polynucleotides, wherein each gRNA polynucleotide comprises a homology region complementary to a different gene sequence of any one of SEQ ID NOs: 1-135, or a variant thereof. In some embodiments, the composition comprises at least 8 gRNA polynucleotides, wherein each gRNA polynucleotide comprises a homology region complementary to a different gene sequence of any one of SEQ ID NOs: 1-135, or a variant thereof. In some embodiments, the composition comprises at least 9 gRNA polynucleotides, wherein each gRNA polynucleotide comprises a homology region complementary to a different gene sequence of any one of SEQ ID NOs: 1-135, or a variant thereof. In some embodiments, the composition comprises at least 10 gRNA polynucleotides, wherein each gRNA polynucleotide comprises a homology region complementary to a different gene sequence of any one of SEQ ID NOs: 1-135, or a variant thereof. In some embodiments, the composition comprises at least 11 gRNA polynucleotides, wherein each gRNA polynucleotide comprises a homology region complementary to a different gene sequence of any one of SEQ ID NOs: 1-135, or a variant thereof. In some embodiments, the composition comprises at least 12 gRNA polynucleotides, wherein each gRNA polynucleotide comprises a homology region complementary to a different gene sequence of any one of SEQ ID NOs: 1-135, or a variant thereof. In some embodiments, the composition comprises at least 13 gRNA polynucleotides, wherein each gRNA polynucleotide comprises a homology region complementary to a different gene sequence of any one of SEQ ID NOs: 1-135, or a variant thereof. In some embodiments, the composition comprises at least 14 gRNA polynucleotides, wherein each gRNA polynucleotide comprises a homology region complementary to a different gene sequence of any one of SEQ ID NOs: 1-135, or a variant thereof. In some embodiments, the composition comprises at least 15 gRNA polynucleotides, wherein each gRNA polynucleotide comprises a homology region complementary to a different gene sequence of any one of SEQ ID NOs: 1-135, or a variant thereof. In some embodiments, the composition comprises at least 16 gRNA polynucleotides, wherein each gRNA polynucleotide comprises a homology region complementary to a different gene sequence of any one of SEQ ID NOs: 1-135, or a variant thereof. In some embodiments, the composition comprises at least 17 gRNA polynucleotides, wherein each gRNA polynucleotide comprises a homology region complementary to a different gene sequence of any one of SEQ ID NOs: 1-135, or a variant thereof. In some embodiments, the composition comprises at least 18 gRNA polynucleotides, wherein each gRNA polynucleotide comprises a homology region complementary to a different gene sequence of any one of SEQ ID NOs: 1-135, or a variant thereof. In some embodiments, the composition comprises at least 19 gRNA polynucleotides, wherein each gRNA polynucleotide comprises a homology region complementary to a different gene sequence of any one of SEQ ID NOs: 1-135, or a variant thereof. In some embodiments, the composition comprises at least 20 gRNA polynucleotides, wherein each gRNA polynucleotide comprises a homology region complementary to a different gene sequence of any one of SEQ ID NOs: 1-135, or a variant thereof. In some embodiments, the composition comprises at least 21 gRNA polynucleotides, wherein each gRNA polynucleotide comprises a homology region complementary to a different gene sequence of any one of SEQ ID NOs: 1-135, or a variant thereof. In some embodiments, the composition comprises at least 22 gRNA polynucleotides, wherein each gRNA polynucleotide comprises a homology region complementary to a different gene sequence of any one of SEQ ID NOs: 1-135, or a variant thereof. In some embodiments, the composition comprises at least 23 gRNA polynucleotides, wherein each gRNA polynucleotide comprises a homology region complementary to a different gene sequence of any one of SEQ ID NOs: 1-135, or a variant thereof. In some embodiments, the composition comprises at least 24 gRNA polynucleotides, wherein each gRNA polynucleotide comprises a homology region complementary to a different gene sequence of any one of SEQ ID NOs: 1-135, or a variant thereof. In some embodiments, the composition comprises at least 25 gRNA polynucleotides, wherein each gRNA polynucleotide comprises a homology region complementary to a different gene sequence of any one of SEQ ID NOs: 1-135, or a variant thereof. In some embodiments, the composition comprises at least 26 gRNA polynucleotides, wherein each gRNA polynucleotide comprises a homology region complementary to a different gene sequence of any one of SEQ ID NOs: 1-135, or a variant thereof. In some embodiments, the composition comprises at least 27 gRNA polynucleotides, wherein each gRNA polynucleotide comprises a homology region complementary to a different gene sequence of any one of SEQ ID NOs: 1-135, or a variant thereof. In some embodiments, the composition comprises at least 28 gRNA polynucleotides, wherein each gRNA polynucleotide comprises a homology region complementary to a different gene sequence of any one of SEQ ID NOs: 1-135, or a variant thereof. In some embodiments, the composition comprises at least 29 gRNA polynucleotides, wherein each gRNA polynucleotide comprises a homology region complementary to a different gene sequence of any one of SEQ ID NOs: 1-135, or a variant thereof. In some embodiments, the composition comprises at least 30 gRNA polynucleotides, wherein each gRNA polynucleotide comprises a homology region complementary to a different gene sequence of any one of SEQ ID NOs: 1-135, or a variant thereof. In some embodiments, the composition comprises at least 40 gRNA polynucleotides, wherein each gRNA polynucleotide comprises a homology region complementary to a different gene sequence of any one of SEQ ID NOs: 1-135, or a variant thereof. In some embodiments, the composition comprises at least 50 gRNA polynucleotides, wherein each gRNA polynucleotide comprises a homology region complementary to a different gene sequence of any one of SEQ ID NOs: 1-135, or a variant thereof. In some embodiments, the composition comprises at least 60 gRNA polynucleotides, wherein each gRNA polynucleotide comprises a homology region complementary to a different gene sequence of any one of SEQ ID NOs: 1-135, or a variant thereof. In some embodiments, the composition comprises at least 70 gRNA polynucleotides, wherein each gRNA polynucleotide comprises a homology region complementary to a different gene sequence of any one of SEQ ID NOs: 1-135, or a variant thereof. In some embodiments, the composition comprises at least 80 gRNA polynucleotides, wherein each gRNA polynucleotide comprises a homology region complementary to a different gene sequence of any one of SEQ ID NOs: 1-135, or a variant thereof. In some embodiments, the composition comprises at least 90 gRNA polynucleotides, wherein each gRNA polynucleotide comprises a homology region complementary to a different gene sequence of any one of SEQ ID NOs: 1-135, or a variant thereof. In some embodiments, the composition comprises at least 100 gRNA polynucleotides, wherein each gRNA polynucleotide comprises a homology region complementary to a different gene sequence of any one of SEQ ID NOs: 1-135, or a variant thereof. In some embodiments, the composition comprises at least 110 gRNA polynucleotides, wherein each gRNA polynucleotide comprises a homology region complementary to a different gene sequence of any one of SEQ ID NOs: 1-135, or a variant thereof. In some embodiments, the composition comprises at least 120 gRNA polynucleotides, wherein each gRNA polynucleotide comprises a homology region complementary to a different gene sequence of any one of SEQ ID NOs: 1-135, or a variant thereof. In some embodiments, the composition comprises at least 130 gRNA polynucleotides), wherein each gRNA polynucleotide comprises a homology region complementary to a different gene sequence of any one of SEQ ID NOs: 1-135, or a variant thereof.

[0163] In some embodiment, a plurality of guide RNA polynucleotides comprises at least 2 guide RNA polynucleotides (e.g., at least 2, at least 5, at least 25, at least 50, at least 100, at least 250, at least 500, at least 1000, at least 2000, at least 2500, at least 5000, at least 10000, at least 15000, at least 20000, at least 25000, at least 30000, at least 50000, at least 100000, or at least 1000000 guide RNA polynucleotides) having different sequences. In some embodiments, a plurality of plurality of gRNA polynucleotides comprises no more than 1000, 2500, 5000, 10,000, 15,000 or 20,000 polynucleotides. In some embodiments, the plurality of guide RNA polynucleotides comprises between 2-1000, 2-2500, 2-5000, 2-1000, 2-15000, 2-20000, 2-40000, 2-50000, 2-100000, 5-1000, 5-2500, 5-5000, 5-1000, 5-15000, 5-20000, 5-40000, 5-50000, 5-100000, 10-1000, 10-2500, 10-5000, 10-1000, 10-15000, 10-20000, 10-40000, 10-50000, 10-100000, 20-1000, 20-2500, 20-5000, 20-1000, 20-15000, 20-20000, 20-40000, 20-50000, 20-100000, 50-1000, 50-2500, 50-5000, 50-10000, 50-15000, 50-20000, 50-40000, 50-50000, 50-100000, 100-1000, 100-2500, 100-5000, 100-10000, 100-15000, 100-20000, 100-40000, 100-50000, 100-100000, 135-1000, 135-2500, 135-5000, 135-10000, 135-15000, 135-20000, 135-40000, 135-50000, or 135-100000 guide RNA polynucleotides having different sequences. In some embodiments, the different sequences are complementary to one or more of SEQ ID NOs: 1-135. In some embodiments, the plurality of guide RNA polynucleotides comprises between 2-1300 guide RNA polynucleotides having different sequences, In some embodiments, the plurality of guide RNA polynucleotides comprises between 2-1200 guide RNA polynucleotides having different sequences, In some embodiments, the plurality of guide RNA polynucleotides comprises between 2-1100 guide RNA polynucleotides having different sequences, In some embodiments, the plurality of guide RNA polynucleotides comprises between 2-1080 guide RNA polynucleotides having different sequences, In some embodiments, the plurality of guide RNA polynucleotides comprises between 5-1300 guide RNA polynucleotides having different sequences, In some embodiments, the plurality of guide RNA polynucleotides comprises between 5-1200 guide RNA polynucleotides having different sequences, In some embodiments, the plurality of guide RNA polynucleotides comprises between 5-1100 guide RNA polynucleotides having different sequences, In some embodiments, the plurality of guide RNA polynucleotides comprises between 5-1080 guide RNA polynucleotides having different sequences, In some embodiments, the plurality of guide RNA polynucleotides comprises between 10-1300 guide RNA polynucleotides having different sequences, In some embodiments, the plurality of guide RNA polynucleotides comprises between 10-1200 guide RNA polynucleotides having different sequences, In some embodiments, the plurality of guide RNA polynucleotides comprises between 10-1100 guide RNA polynucleotides having different sequences, In some embodiments, the plurality of guide RNA polynucleotides comprises between 10-1080 guide RNA polynucleotides having different sequences,

[0164] In some embodiments, the composition comprises at most 1000 (e.g., at most 2500, at most 5000, at most 7500, at most 10000, at most 15000, at most 20000, at most 25000, at most 30000, at most 35000, at most 40000, at most 45000, at most 50000, at most 60000, at most 70000, at most 80000, at most 90000, at most 100000 polynucleotides, at most 250,000, at most 500,000, at most 750,000 or at most 1,000,000) guide RNA polynucleotides having different sequences. In some embodiments, the composition comprises at most 1000 guide RNA polynucleotides having different sequences. In some embodiments, the composition comprises at most 2500 guide RNA polynucleotides having different sequences. In some embodiments, the composition comprises at most 5000 guide RNA polynucleotides having different sequences, In some embodiments, the composition comprises at most 7500 guide RNA polynucleotides having different sequences. In some embodiments, the composition comprises at most 10000 guide RNA polynucleotides having different sequences. In some embodiments, the composition comprises at most 15000 guide RNA polynucleotides having different sequences. In some embodiments, the composition comprises at most 20000 guide RNA polynucleotides having different sequences. In some embodiments, the compositions comprise at most 25000 guide RNA polynucleotides having different sequences. In some embodiments, the composition comprises at most 30000 guide RNA polynucleotides having different sequences. In some embodiments, the composition comprises at most 35000 guide RNA polynucleotides having different sequences. In some embodiments, the composition comprises at most 40000 guide RNA polynucleotides having different sequences. In some embodiments, the composition comprises at most 45000 guide RNA polynucleotides having different sequences. In some embodiments, the composition comprises at most 50000 guide RNA polynucleotides having different sequences. In some embodiments, the composition comprises at most 60000 guide RNA polynucleotides having different sequences. In some embodiments, the composition comprises at most 70000 guide RNA polynucleotides having different sequences. In some embodiments, the composition comprises at most 80000 guide RNA polynucleotides having different sequences. In some embodiments, the composition comprises at most 90000 guide RNA polynucleotides having different sequences. In some embodiments, the composition comprises at most 100000 guide RNA polynucleotides having different sequences. In some embodiments, the compositions comprises between 2-1000, 2-2500, 2-5000, 2-1000, 2-15000, 2-20000, 2-40000, 2-50000, 2-100000, 2-1000000, 5-1000, 5-2500, 5-5000, 5-1000, 5-15000, 5-20000, 5-40000, 5-50000, 5-100000, 5-1000000, 10-1000, 10-2500, 10-5000, 10-1000, 10-15000, 10-20000, 10-40000, 10-50000, 10-100000, 10-1000000, 20-1000, 20-2500, 20-5000, 20-1000, 20-15000, 20-20000, 20-40000, 20-50000, 20-100000, 20-1000000, 50-1000, 50-2500, 50-5000, 50-10000, 50-15000, 50-20000, 50-40000, 50-50000, 50-100000, 50-1000000, 100-1000, 100-2500, 100-5000, 100-10000, 100-15000, 100-20000, 100-40000, 100-50000, 100-100000, 100-1000000, 135-1000, 135-2500, 135-5000, 135-10000, 135-15000, 135-20000, 135-40000, 135-50000, or 135-100000, 135-1000000, 1080-1000, 1080-2500, 1080-5000, 1080-10000, 1080-15000, 1080-20000, 1080-40000, 1080-50000, or 1080-100000, 1080-1000000 guide RNA polynucleotides having different sequences. The skilled person will understand that many copies of any one guide RNA polynucleotide may be present in the composition and that these copies have the same sequence.

[0165] In some embodiments, the guide RNA polynucleotides of the composition are complementary to at most 20,000 different gene sequences. In some embodiments, the guide RNA polynucleotides of the composition are complementary to at most 19,000 different gene sequences. In some embodiments, the guide RNA polynucleotides of the composition are complementary to at most 18,000 different gene sequences. In some embodiments, the guide RNA polynucleotides of the composition are complementary to at most 17,000 different gene sequences. In some embodiments, the guide RNA polynucleotides of the composition are complementary to at most 16,000 different gene sequences. In some embodiments, the guide RNA polynucleotides of the composition are complementary to at most 15,000 different gene sequences. In some embodiments, the guide RNA polynucleotides of the composition are complementary to at most 14,000 different gene sequences. In some embodiments, the guide RNA polynucleotides of the composition are complementary to at most 13,000 different gene sequences. In some embodiments, the guide RNA polynucleotides of the composition are complementary to at most 12,000 different gene sequences. In some embodiments, the guide RNA polynucleotides of the composition are complementary to at most 11,000 different gene sequences. In some embodiments, the guide RNA polynucleotides of the composition are complementary to at most 10,000 different gene sequences. In some embodiments, the guide RNA polynucleotides of the composition are complementary to at most 9,000 different gene sequences. In some embodiments, the guide RNA polynucleotides of the composition are complementary to at most 8,000 different gene sequences. In some embodiments, the guide RNA polynucleotides of the composition are complementary to at most 7,000 different gene sequences. In some embodiments, the guide RNA polynucleotides of the composition are complementary to at most 6,000 different gene sequences. In some embodiments, the guide RNA polynucleotides of the composition are complementary to at most 5,000 different gene sequences. In some embodiments, the guide RNA polynucleotides of the composition are complementary to at most 4,000 different gene sequences. In some embodiments, the guide RNA polynucleotides of the composition are complementary to at most 3,000 different gene sequences. In some embodiments, the guide RNA polynucleotides of the composition are complementary to at most 2,000 different gene sequences. In some embodiments, the guide RNA polynucleotides of the composition are complementary to at most 1,000 different gene sequences. In some embodiments, the guide RNA polynucleotides of the composition are complementary to at most 900 different gene sequences. In some embodiments, the guide RNA polynucleotides of the composition are complementary to at most 800 different gene sequences.

[0166] In some embodiments, the guide RNA polynucleotides of the composition are complementary to at most 700 different gene sequences. In some embodiments, the guide RNA polynucleotides of the composition are complementary to at most 600 different gene sequences. In some embodiments, the guide RNA polynucleotides of the composition are complementary to at most 500 different gene sequences. In some embodiments, the guide RNA polynucleotides of the composition are complementary to at most 400 different gene sequences. In some embodiments, the guide RNA polynucleotides of the composition are complementary to at most 300 different gene sequences. In some embodiments, the guide RNA polynucleotides of the composition are complementary to at most 200 different gene sequences. In some embodiments, the guide RNA polynucleotides of the composition are complementary to at most 135 different gene sequences.

[0167] In some embodiments, the guide RNA polynucleotides of the composition are complementary 135 different gene sequences (e.g., SEQ ID NOs: 1-135).

[0168] In some embodiments, the guide RNAs of the composition do not comprise a guide RNA polynucleotide that is complementary to a sense strand or an antisense strand of a gene encoding a tumor suppressor. Without being bound to theory, mutation (e.g., loss of function) of a tumor suppressor gene in a cell (e.g., a CAR-T cell) can result in the cell becoming tumorigenic or cancerous. In some embodiments, this is undesirable in the guide RNA polynucleotide compositions described herein because these compositions may be used to generate a cellular therapy (e.g., CAR-T cell therapy) that is administered to a subject (e.g., a human subject having cancer). If the guide RNA polynucleotide library comprises a guide RNA that is complementary to a tumor suppressor, this may generate a cell (e.g. CAR T cell) that could give a subject cancer or a tumor. Genes that encode tumor suppressors are known in the art e.g., as described in Cooper G M. The Cell: A Molecular Approach. 2nd edition. Sunderland (MA): Sinauer Associates; 2000. Tumor Suppressor Genes. Available from: ncbi.nlm.nih.gov/books/NBK9894/.

[0169] In some embodiments, the compositions (e.g., compositions comprising a plurality of gRNA polynucleotides) described herein do not comprises on one or more of p53 (e.g., e.g., Uniprot: P04637), Rb (e.g., Uniprot: P06400), PTEN (e.g., Uniprot: P60484), BRCA1 (e.g., Uniprot: P38398), and/or BRCA2 (e.g., Uniprot: P51587). In some embodiments, the compositions (e.g., compositions comprising a plurality of gRNA polynucleotides) described herein do not comprises on one or more of P53 (e.g., Uniprot: P04637), PTEN (e.g., Uniprot: P60484), APC (e.g., Uniprot: P25054), P16INK4a (e.g., Uniprot: P42771), P15INK4b (e.g., Uniprot: P42772), Cadherin-1 (e.g., Uniprot: Q12864), RB1 (e.g., Uniprot: P06400), BRCA1 (e.g., Uniprot: P38398), Wilms tumor 1 (e.g., Uniprot: P19544), STK11 (e.g., Uniprot: Q15831), Smad4 (e.g., Uniprot: Q13485), BRCA2 (e.g., Uniprot: P51587), CHEK2 (e.g., Uniprot: O96017), P14arf (e.g., Uniprot: Q8N726), P21 (e.g., Uniprot: Q9H633), P73 (e.g., Uniprot: O15350), PTCH1 (e.g., Uniprot: Q13635), and/or MSH2 (e.g., Uniprot: P43246).

[0170] In some embodiments, the guide RNAs of the composition do not comprise a guide RNA polynucleotide that is complementary to a sense strand or an antisense strand of a gene that is essential for T cell function. In some embodiments, the guide RNAs of the composition do not comprise a guide RNA polynucleotide that is complementary to a sense strand or an antisense strand of a gene encoding of one or more of DAD1 (e.g., Uniprot: P61803), SUPT4H1 (e.g., Uniprot: P63272), ZNF626 (e.g., Uniprot: Q68DY1), RAC2 (e.g., Uniprot: P15153), MARS (e.g., Uniprot: P56192), NAA10 (e.g., Uniprot: P41227), ORAOV1 (e.g., Uniprot: Q8WV07), TRMT112 (e.g., Uniprot: Q9UI30), RPP21 (e.g., Uniprot: Q9H633), VHL (e.g., Uniprot: P40337), NOP14 (e.g., Uniprot: P78316), OGT (e.g., Uniprot: O15294), UTP3 (e.g., Uniprot: Q9NQZ2), VARS (e.g., Uniprot: P26640), CCND3 (e.g., Uniprot: P30281), TAF6 (e.g., Uniprot: P49848), CDK6 (e.g., Uniprot: Q00534), CD247 (e.g., Uniprot: P20963), LCP2 (e.g., Uniprot: Q13094), EXOSC6 (e.g., Uniprot: Q5RKV6), RHOH (e.g., Uniprot: Q15669), VAV1 (e.g., Uniprot: P15498), MYC (e.g., Uniprot: P01106), POLR3H (e.g., Uniprot: Q9Y535), LAT (e.g., Uniprot: 043561), CD3D (e.g., Uniprot: P04234), WDR18 (e.g., Uniprot: Q9BV38), POLR2L (e.g., Uniprot: P62875), TMX1 (e.g., Uniprot: Q9H3N1), PRF1 (e.g., Uniprot: Q42449), STX11 (e.g., Uniprot: O75558), or STXBP2 (e.g., Uniprot: Q15833), or a variant thereof.

[0171] In some embodiments, a variant thereof refers to a homolog, ortholog or paralog of a gene (e.g., a gene encoded by any one of SEQ ID NOs: 1-135). In some embodiments, variants of the same gene are different alleles. In some embodiments, a variant thereof refers to an amino acid sequence that is at least 60% identical to any one of SEQ ID NOs: 1-135. In some embodiments, a variant thereof refers to an amino acid sequence that is at least 65% identical to any one of SEQ ID NOs: 1-135. In some embodiments, a variant thereof refers to an amino acid sequence that is at least 70% identical to any one of SEQ ID NOs: 1-135. In some embodiments, a variant thereof refers to an amino acid sequence that is at least 75% identical to any one of SEQ ID NOs: 1-135. In some embodiments, a variant thereof refers to an amino acid sequence that is at least 80% identical to any one of SEQ ID NOs: 1-135. In some embodiments, a variant thereof refers to an amino acid sequence that is at least 85% identical to any one of SEQ ID NOs: 1-135. In some embodiments, a variant thereof refers to an amino acid sequence that is at least 90% identical to any one of SEQ ID NOs: 1-135. In some embodiments, a variant thereof refers to an amino acid sequence that is at least 95% identical to any one of SEQ ID NOs: 1-135. In some embodiments, a variant thereof refers to an amino acid sequence that is at least 99% identical to any one of SEQ ID NOs: 1-135. In some embodiments, a variant thereof refers to an amino acid sequence that is at least 99.5% identical to any one of SEQ ID NOs: 1-135. In some embodiments, a variant thereof refers to an amino acid sequence that is at least 99.9% identical to any one of SEQ ID NOs: 1-135.

[0172] In some embodiments, the composition comprises at least X gRNA polynucleotides per gene sequence, wherein the at least X gRNA polynucleotides comprise different sequences complementary to a given gene. For example, in some embodiments, the composition comprises at least 2 gRNA polynucleotides per gene sequence, wherein the at least 2 gRNA polynucleotides comprise different sequences complementary to a given gene (e.g., the sense strand or antisense strand of the gene). So in such embodiments, if the composition comprises gRNA polynucleotides comprising homology regions complementary to Y different genes (e.g., any one of Y different SEQ ID NOs), then the composition would comprise at least 2Y gRNA polynucleotides, with at least 2 gRNA polynucleotides comprising homology regions complementary to each of the Y genes and wherein those at least 2 gRNA polynucleotides comprise different sequences complementary to a given gene. In some embodiments, the at least X gRNA polynucleotides comprise homology regions complementary to different regions (e.g., different exons or introns or different regions encoding different domains of the protein encoded by a gene) of the same gene sequence. In some embodiments, the at least X gRNA polynucleotides comprise homology regions complementary to overlapping regions of the same gene sequence. In some embodiments, the composition comprises at least 2 gRNA polynucleotides per gene sequence, wherein the gRNA polynucleotides comprise different sequences complementary to said gene sequence (e.g., SEQ ID NOs: 1-135).

[0173] In some embodiments, the composition comprises at least 2 gRNA polynucleotides per gene sequence, wherein the gRNA polynucleotides comprise different sequences complementary to said gene sequence (e.g., SEQ ID NOs: 1-135, or the reverse complement of any one of SEQ ID NOs: 1-135). In some embodiments, the composition comprises at least 3 gRNA polynucleotides per gene sequence, wherein the gRNA polynucleotides comprise different sequences complementary to said gene sequence (e.g., SEQ ID NOs: 1-135, or the reverse complement of any one of SEQ ID NOs: 1-135). In some embodiments, the composition comprises at least 4 gRNA polynucleotides per gene sequence, wherein the gRNA polynucleotides comprise different sequences complementary to said gene sequence (e.g., SEQ ID NOs: 1-135, or the reverse complement of any one of SEQ ID NOs: 1-135). In some embodiments, the composition comprises at least 5 gRNA polynucleotides per gene sequence, wherein the gRNA polynucleotides comprise different sequences complementary to said gene sequence (e.g., SEQ ID NOs: 1-135, or the reverse complement of any one of SEQ ID NOs: 1-135). In some embodiments, the composition comprises at least 6 gRNA polynucleotides per gene sequence, wherein the gRNA polynucleotides comprise different sequences complementary to said gene sequence (e.g., SEQ ID NOs: 1-135, or the reverse complement of any one of SEQ ID NOs: 1-135). In some embodiments, the composition comprises at least 7 gRNA polynucleotides per gene sequence, wherein the gRNA polynucleotides comprise different sequences complementary to said gene sequence (e.g., SEQ ID NOs: 1-135, or the reverse complement of any one of SEQ ID NOs: 1-135). In some embodiments, the composition comprises at least 8 gRNA polynucleotides per gene sequence, wherein the gRNA polynucleotides comprise different sequences complementary to said gene sequence (e.g., SEQ ID NOs: 1-135, or the reverse complement of any one of SEQ ID NOs: 1-135). In some embodiments, the composition comprises at least 9 gRNA polynucleotides per gene sequence, wherein the gRNA polynucleotides comprise different sequences complementary to said gene sequence (e.g., SEQ ID NOs: 1-135, or the reverse complement of any one of SEQ ID NOs: 1-135). In some embodiments, the composition comprises at least 10 gRNA polynucleotides per gene sequence, wherein the gRNA polynucleotides comprise different sequences complementary to said gene sequence (e.g., SEQ ID NOs: 1-135, or the reverse complement of any one of SEQ ID NOs: 1-135). In some embodiments, the composition comprises at least 12 gRNA polynucleotides per gene sequence, wherein the gRNA polynucleotides comprise different sequences complementary to said gene sequence (e.g., SEQ ID NOs: 1-135, or the reverse complement of any one of SEQ ID NOs: 1-135). In some embodiments, the composition comprises at least 15 gRNA polynucleotides per gene sequence, wherein the gRNA polynucleotides comprise different sequences complementary to said gene sequence (e.g., SEQ ID NOs: 1-135, or the reverse complement of any one of SEQ ID NOs: 1-135). In some embodiments, the composition comprises at least 18 gRNA polynucleotides per gene sequence, wherein the gRNA polynucleotides comprise different sequences complementary to said gene sequence (e.g., SEQ ID NOs: 1-135, or the reverse complement of any one of SEQ ID NOs: 1-135). In some embodiments, the composition comprises at least 20 gRNA polynucleotides per gene sequence, wherein the gRNA polynucleotides comprise different sequences complementary to said gene sequence (e.g., SEQ ID NOs: 1-135, or the reverse complement of any one of SEQ ID NOs: 1-135).

[0174] In some embodiments, the composition comprises 1-20, 2-20, 2-15, 2-10, 2-8, 2-5, 4-20, 4-15, 4-10, 4-8, 3-15, 3-10, 3-8, 3-6, 4-20, 4-15, 4-10, 4-8, 4-6, 5-20, 5-15, 5-10, 5-8, 6-20, 6-15, 6-10, 6-8, 7-20, 7-15, 7-10, or 7-8 polynucleotides per gene sequence, wherein each gRNA polynucleotide comprises different sequences complementary to said gene sequence or the reverse complement of said gene sequence. In some embodiments, the composition comprises 1, 2, 3, 4, 5, 6, 7, 8, 9, 10, 11, 12, 13, 14, 15, 16, 17, 18, 19, 20, or more gRNA polynucleotides per gene sequence, wherein each gRNA polynucleotide comprises a different sequence complementary to said gene sequence or the reverse complement of said gene sequence. In some embodiments, the composition comprises 8 gRNA polynucleotides per gene sequence, wherein each gRNA polynucleotide comprises a different sequence complementary to said gene sequence or the reverse complement of said gene sequence. In some embodiments, the multiple gRNA polynucleotides (e.g., 8) are complementary to different regions of the same gene sequence or the reverse complement of said gene sequence.

[0175] In some embodiments, the composition comprises one or more negative control guide RNA polynucleotides. In some embodiments, a negative control guide RNA polynucleotide is a guide RNA polynucleotide that is not expected to have an effect of CAR-T cell efficacy. In some embodiments, a negative control guide RNA polynucleotide is a guide RNA polynucleotide whose homology region is not complementary to a gene in the genome of the immune cell (e.g., CAR-T cell). In some embodiments, a negative control gRNA comprises a homology regions that is complementary intergenic regions. In some embodiments, a negative control gRNA polynucleotide comprises a randomly generated homology region. In some embodiments, negative control guide RNA sequences comprise nucleotides sequence of any one of SEQ ID NOs: 1216-1315.

[0176] In some embodiments, the composition comprises at least 1 gRNA polynucleotide of any one of SEQ ID NOs: 136-1215 or any variant thereof. In some embodiments, the composition comprises at least 2 gRNA polynucleotide of any one of SEQ ID NOs: 136-1215 or a variant of any thereof. In some embodiments, the composition comprises at least 3 gRNA polynucleotide of any one of SEQ ID NOs: 136-1215 or any variant thereof. In some embodiments, the composition comprises at least 4 gRNA polynucleotide of any one of SEQ ID NOs: 136-1215 or any variant thereof. In some embodiments, the composition comprises at least 5 gRNA polynucleotide of any one of SEQ ID NOs: 136-1215 or any variant thereof. In some embodiments, the composition comprises at least 6 gRNA polynucleotide of any one of SEQ ID NOs: 136-1215 or any variant thereof. In some embodiments, the composition comprises at least 7 gRNA polynucleotide of any one of SEQ ID NOs: 136-1215 or any variant thereof. In some embodiments, the composition comprises at least 8 gRNA polynucleotide of any one of SEQ ID NOs: 136-1215 or any variant thereof. In some embodiments, the composition comprises at least 9 gRNA polynucleotide of any one of SEQ ID NOs: 136-1215 or any variant thereof. In some embodiments, the composition comprises at least 10 gRNA polynucleotide of any one of SEQ ID NOs: 136-1215 or any variant thereof. In some embodiments, the composition comprises at least 11 gRNA polynucleotide of any one of SEQ ID NOs: 136-1215 or any variant thereof. In some embodiments, the composition comprises at least 12 gRNA polynucleotide of any one of SEQ ID NOs: 136-1215 or any variant thereof. In some embodiments, the composition comprises at least 13 gRNA polynucleotide of any one of SEQ ID NOs: 136-1215 or any variant thereof. In some embodiments, the composition comprises at least 14 gRNA polynucleotide of any one of SEQ ID NOs: 136-1215 or any variant thereof. In some embodiments, the composition comprises at least 15 gRNA polynucleotide of any one of SEQ ID NOs: 136-1215 or any variant thereof. In some embodiments, the composition comprises at least 16 gRNA polynucleotide of any one of SEQ ID NOs: 136-1215 or any variant thereof. In some embodiments, the composition comprises at least 17 gRNA polynucleotide of any one of SEQ ID NOs: 136-1215 or any variant thereof. In some embodiments, the composition comprises at least 18 gRNA polynucleotide of any one of SEQ ID NOs: 136-1215 or any variant thereof. In some embodiments, the composition comprises at least 19 gRNA polynucleotide of any one of SEQ ID NOs: 136-1215 or any variant thereof. In some embodiments, the composition comprises at least 20 gRNA polynucleotide of any one of SEQ ID NOs: 136-1215 or any variant thereof. In some embodiments, the composition comprises at least 21 gRNA polynucleotide of any one of SEQ ID NOs: 136-1215 or any variant thereof. In some embodiments, the composition comprises at least 22 gRNA polynucleotide of any one of SEQ ID NOs: 136-1215 or any variant thereof. In some embodiments, the composition comprises at least 23 gRNA polynucleotide of any one of SEQ ID NOs: 136-1215 or any variant thereof. In some embodiments, the composition comprises at least 24 gRNA polynucleotide of any one of SEQ ID NOs: 136-1215 or any variant thereof. In some embodiments, the composition comprises at least 25 gRNA polynucleotide of any one of SEQ ID NOs: 136-1215 or any variant thereof. In some embodiments, the composition comprises at least 26 gRNA polynucleotide of any one of SEQ ID NOs: 136-1215 or any variant thereof. In some embodiments, the composition comprises at least 27 gRNA polynucleotide of any one of SEQ ID NOs: 136-1215 or any variant thereof. In some embodiments, the composition comprises at least 28 gRNA polynucleotide of any one of SEQ ID NOs: 136-1215 or any variant thereof. In some embodiments, the composition comprises at least 29 gRNA polynucleotide of any one of SEQ ID NOs: 136-1215 or any variant thereof. In some embodiments, the composition comprises at least 30 gRNA polynucleotide of any one of SEQ ID NOs: 136-1215 or any variant thereof. In some embodiments, the compositions comprise at least 40 gRNA polynucleotide of any one of SEQ ID NOs: 136-1215 or any variant thereof. In some embodiments, the composition comprises at least 50 gRNA polynucleotide of any one of SEQ ID NOs: 136-1215 or any variant thereof. In some embodiments, the compositions comprises at least 60 gRNA polynucleotide of any one of SEQ ID NOs: 136-1215 or any variant thereof.

[0177] In some embodiments, the composition comprises at least 70 gRNA polynucleotides of any one of SEQ ID NOs: 136-1215 or any variant thereof. In some embodiments, the composition comprises at least 80 gRNA polynucleotides of any one of SEQ ID NOs: 136-1215 or any variant thereof. In some embodiments, the composition comprises at least 90 gRNA polynucleotides of any one of SEQ ID NOs: 136-1215 or any variant thereof. In some embodiments, the composition comprises at least 100 gRNA polynucleotides of any one of SEQ ID NOs: 136-1215 or any variant thereof. In some embodiments, the compositions comprises at least 200 gRNA polynucleotides of any one of SEQ ID NOs: 136-1215 or any variant thereof. In some embodiments, the composition comprises at least 300 gRNA polynucleotides of any one of SEQ ID NOs: 136-1215 or any variant thereof. In some embodiments, the composition comprises at least 400 gRNA polynucleotides of any one of SEQ ID NOs: 136-1215 or any variant thereof.

[0178] In some embodiments, the composition comprises at least 500 gRNA polynucleotides of any one of SEQ ID NOs: 136-1215 or any variant thereof. In some embodiments, the compositions comprises at least 1000 gRNA polynucleotides selected from the group consisting of SEQ ID NOs: 136-1215 or any variant thereof.

[0179] In some embodiments, the composition comprises gRNA polynucleotides comprising the sequences of SEQ ID NOs: 136-1215 or any variant thereof. In some embodiments, the composition comprises gRNA polynucleotides comprising the sequences of SEQ ID NOS: 136-1215. In some embodiments, the composition comprises a gRNA polynucleotide comprising any one of SEQ ID NOs: 1216-1315. In some embodiments, the composition comprises gRNA polynucleotides comprising SEQ ID NOs: 1216-1315.

[0180] In some aspects, the present application discloses guide RNA polynucleotides. In some embodiments, a guide RNA polynucleotide is the guide RNA polynucleotide of any one of the compositions described herein. In some embodiments, the guide RNA polynucleotides comprise the sequence of any one of SEQ ID NOs: 136-1315, or a variant of any thereof.

### Plasmids, Vectors and Libraries Thereof

### Plasmids

[0181] In some aspects, the present application discloses a plasmid comprising any one of the gRNA polynucleotides disclosed herein. A “plasmid” as described herein, may refer to a circular piece of DNA comprising sequence elements for replication and expression of a polynucleotide (e.g., a gRNA). In some the replication element is an origin of replication (e.g., a bacterial origin of replication). In some embodiments, the expression sequence elements comprising a promoter and a terminator. In some embodiments, the plasmid comprises a selection marker (e.g., an antibiotic marker).

[0182] A “plasmid library” as described herein may comprise at least two plasmids, as described herein, encoding different gRNA polynucleotides. In some embodiments, the plasmid library comprises at least 3, (e.g., at least 4, at least 5, at least 6, at least 7, at least 8, at least 9, at least 10, at least 11, at least 12, at least 13, at least 14, at least 15, at least 16, at least 17, at least 18, at least 19 at least 20, at least 21, at least 22, at least 23, at least 24, at least 25, at least 26, at least 27, at least 28, at least 29, at least 30, at least 40, at least 50, at least 60, at least 70, at least 80, at least 90, at least 100, at least 200, at least 300, at least 400, at least 500, at least 1000, at least 5000, at least 10000, at least 15000, at least 20000, at least 30000, at least 40000, at least 50000, at least 60000, at least 70000, at least 80000, at least 90000, at least 100000, at least 1000000) plasmids encoding different gRNA polynucleotides (e.g., gRNA polynucleotides disclosed herein or variants thereof).

gRNA Vector

[0183] In some embodiments, the present application discloses a gRNA vector comprising: (1) a first gRNA polynucleotide comprising a homology region that is complementary to a marker protein (e.g., the TCR/CD3 complex (any one of SEQ ID NO: 1383-1389) of a T cell), and (2) a second gRNA polynucleotide.

[0184] In some embodiments, the first gRNA polynucleotide comprising a homology region of SEQ ID NO: 1316. In some embodiments, the first guide RNA polynucleotide, when transfected into an immune cell (e.g., a T cell) is used as a marker for CRISPR activity based on loss of TCR/CD3 expression on the immune cell. In some embodiments, the first gRNA polynucleotide is operably linked to a promoter. In some embodiments, the promoter is a constitutively active promoter. In some embodiments, the promoter is a tissue-specific promoter (e.g., an immune cell-specific promoter). In some embodiments, the promoter is an inducible promoter (e.g., a tet or lac promoter). In some embodiments, the promoter is selected from the group consisting of a CMV promoter, an EF1a promoter, a CAG promoter, a PGK promoter, a H1 promoter or a U6 promoter. In some embodiments, the promoter is a U6 promoter.

[0185] In some embodiments, the second gRNA polynucleotide of the gRNA vector comprises any one of the guide RNA polynucleotides described herein. In some embodiments, the second gRNA polynucleotide comprises a sequence that is complementary to an sense or antisense sequence of a gene encoded by any one of SEQ ID NOs: 1-135 or a variant thereof. In some embodiments, the second gRNA polynucleotide comprises a sequence of any one of SEQ ID NOs: 136-1315 or a variant thereof. In some embodiments, the second gRNA polynucleotide comprises a sequence of any one of SEQ ID NOs: 136-1315. In some embodiments, the second gRNA polynucleotide comprises a negative control gRNA sequence as described herein. In some embodiments, the second gRNA polynucleotide comprises a sequence of any one of SEQ ID NOs: 1216-1315 or a variant thereof. In some embodiments, the second gRNA polynucleotide is operably linked to a promoter. In some embodiments, the promoter is a constitutively active promoter. In some embodiments, the promoter is a tissue-specific promoter (e.g., an immune cell-specific promoter). In some embodiments, the promoter is an inducible promoter (e.g., a tet or lac promoter). In some embodiments, the promoter is selected from the group consisting of a CMV promoter, an EF1a promoter, a CAG promoter, a PGK promoter, H1 promoter, or a U6 promoter. In some embodiments, the U6 promoter is from a non-human species. In some embodiments, the U6 promoter is from a human U6 promoter. In some embodiments, the U6 promoter is from cow, mice, rat, pig, yeast, dog, cat, drosophila, or C. elegans. In some embodiments, the promoter is a H1 promoter. In some embodiments, the first gRNA polynucleotide is operably linked to a first promoter and the second gRNA polynucleotide is operably linked to a second promoter. In some embodiments, the first and second promoters are the same promoter (i.e., two different copies of the same promoter). In some embodiments, the first and second promoters are different promoters (i.e., comprise different sequences). In some embodiments, the first promoter is constitutive and the second promoter is inducible or tissue-specific. In some embodiments, both the first and second promoters are constitutive and tissue-specific. In some embodiments, the first gRNA polynucleotide and second gRNA polynucleotide are operably linked to a single promoter (e.g., are transcribed as a single polynucleotide, e.g., and are cleaved after transcription).

[0186] In some embodiments, the first gRNA polynucleotide and the second gRNA polynucleotide are in an inverted orientation in the guide RNA vector. In some embodiments, the first gRNA polynucleotide and the second gRNA polynucleotide are in a tandem orientation in the guide RNA vector. In some embodiments, the first gRNA polynucleotide and the second gRNA polynucleotide are encoded in the same CRISPR array. In some embodiments, the first gRNA polynucleotide and the second gRNA polynucleotide are single guide RNAs.

[0187] In some embodiments, the gRNA vector comprises a selectable marker. A “selectable marker” may refer to molecule that allows for detection of a biological event. For example, a selectable marker may provide evidence that a cell is expressing the gRNA vector. In some embodiments, the selectable marker is a guide RNA (e.g., the first guide RNA described above) that is capable of knocking out a gene (e.g. a cell surface gene), wherein the knockout of the gene can be used as a selectable marker. In some embodiments, the selectable marker is fluorescent marker. In some embodiments, the selectable marker provides resistance to a toxin (e.g., Geneticin, Hygromycin B, Puromycin or Zeocin). In some embodiments, the selectable maker is compatible for use in humans. In some embodiments, the selectable marker is expression of a non-endogenous cell surface protein. In some embodiments, the selectable marker is selected from the group consisting of LGNFR (Nerve Growth Factor Receptor), EGFR, CD19, CD20, CD34 and truncated versions thereof. In some embodiments, the selectable marker is LNGFR. In some embodiments, the selectable maker is operably linked to a promoter (e.g., a promoter described herein). In some embodiments, the selectable marker is operably linked to a weak promoter (e.g., PGK or UBC). In some embodiments, the selectable marker is operably linked to a tissue specific promoter (e.g., the HP1, CD14, CD43, CD45, C68, elastase, endoglin, fibronectin, Flt, GFAP, GPIIb, ICAM-2, mIFN-beta, Mb, NphsI, OG-2, SP-B, SYN1, or WASP gene promoter). In some embodiments, the selectable marker selected for CRISPR activity. In some embodiments, the selectable marker is based on negative selection (e.g., the knockout of a target protein). In some embodiments, the selectable marker is knockout of CD3.

[0188] In some embodiments, the gRNA vector comprises a suicide gene. A “suicide gene” refers to a gene, that when transcribed or translated, is toxic to the host cell (e.g., the cell transcribing or translating the suicide gene). In some embodiments, the suicide gene is operably linked to a promoter (e.g., a promoter described herein). In some embodiments, the suicide gene is operably linked to an inducible promoter. In some embodiments, the suicide gene is operably linked to a weak promoter (e.g., a PGK promoter). In some embodiments, the suicide gene is selected from the group consisting of icaspase9, tEGFR, tCD29, CD20, and tHer2. In some embodiments, the suicide gene is icaspase9.

[0189] In some embodiments, the gRNA vector is a viral vector as described above. In some embodiments, the gRNA vector is selected from the group consisting of an adeno-associated vector, a retroviral vector, or a lentiviral vector. In some embodiments, the lentiviral vector is a third-generation self-inactivating (SIN) lentiviral vector.

[0190] In some embodiments, the gRNA vector comprises a sequence of SEQ ID NO: 1318 and a sequence of a guide RNA polynucleotide as described herein. In some embodiments, the gRNA vector comprises a sequence of SEQ ID NO: 1318 and a sequence of a guide RNA polynucleotide homology region of any one of SEQ ID NOs: 136-1215 or a variant thereof. In some embodiments, the gRNA vector comprises a sequence of SEQ ID NO: 1318 and a sequence of a guide RNA polynucleotide homology region of any one of SEQ ID NOs: 136-1315 or a variant thereof. In some embodiments, the gRNA vector further comprises a polynucleotide encoding a CRISPR protein (e.g., Cas9 or Cas12) as described above.

gRNA Vector Library

[0191] A “gRNA vector library” refers to a composition comprising at least 2 gRNA vectors encoding different gRNA polynucleotides as described herein. In some embodiments, the gRNA vector library comprises at least 3 gRNA vectors encoding different gRNA polynucleotides. In some embodiments, the gRNA vector library comprises at least 4 gRNA vectors encoding different gRNA polynucleotides. In some embodiments, the gRNA vector library comprises at least 5 gRNA vectors encoding different gRNA polynucleotides. In some embodiments, the gRNA vector library comprises at least 6 gRNA vectors encoding different gRNA polynucleotides. In some embodiments, the gRNA vector library comprises at least 7 gRNA vectors encoding different gRNA polynucleotides. In some embodiments, the gRNA vector library comprises at least 8 gRNA vectors encoding different gRNA polynucleotides. In some embodiments, the gRNA vector library comprises at least 9 gRNA vectors encoding different gRNA polynucleotides. In some embodiments, the gRNA vector library comprises at least 10 gRNA vectors encoding different gRNA polynucleotides. In some embodiments, the gRNA vector library comprises at least 11 gRNA vectors encoding different gRNA polynucleotides. In some embodiments, the gRNA vector library comprises at least 12 gRNA vectors encoding different gRNA polynucleotides. In some embodiments, the gRNA vector library comprises at least 13 gRNA vectors encoding different gRNA polynucleotides. In some embodiments, the gRNA vector library comprises at least 14 gRNA vectors encoding different gRNA polynucleotides. In some embodiments, the gRNA vector library comprises at least 15 gRNA vectors encoding different gRNA polynucleotides. In some embodiments, the gRNA vector library comprises at least 16 gRNA vectors encoding different gRNA polynucleotides. In some embodiments, the gRNA vector library comprises at least 17 gRNA vectors encoding different gRNA polynucleotides. In some embodiments, the gRNA vector library comprises at least 18 gRNA vectors encoding different gRNA polynucleotides. In some embodiments, the gRNA vector library comprises at least 19 gRNA vectors encoding different gRNA polynucleotides. In some embodiments, the gRNA vector library comprises at least 20 gRNA vectors encoding different gRNA polynucleotides. In some embodiments, the gRNA vector library comprises at least 21 gRNA vectors encoding different gRNA polynucleotides. In some embodiments, the gRNA vector library comprises at least 22 gRNA vectors encoding different gRNA polynucleotides. In some embodiments, the gRNA vector library comprises at least 23 gRNA vectors encoding different gRNA polynucleotides. In some embodiments, the gRNA vector library comprises at least 24 gRNA vectors encoding different gRNA polynucleotides. In some embodiments, the gRNA vector library comprises at least 25 gRNA vectors encoding different gRNA polynucleotides. In some embodiments, the gRNA vector library comprises at least 26 gRNA vectors encoding different gRNA polynucleotides. In some embodiments, the gRNA vector library comprises at least 27 gRNA vectors encoding different gRNA polynucleotides. In some embodiments, the gRNA vector library comprises at least 28 gRNA vectors encoding different gRNA polynucleotides. In some embodiments, the gRNA vector library comprises at least 29 gRNA vectors encoding different gRNA polynucleotides. In some embodiments, the gRNA vector library comprises at least 30 gRNA vectors encoding different gRNA polynucleotides. In some embodiments, the gRNA vector library comprises at least 40 gRNA vectors encoding different gRNA polynucleotides. In some embodiments, the gRNA vector library comprises at least 50 gRNA vectors encoding different gRNA polynucleotides. In some embodiments, the gRNA vector library comprises at least 60 gRNA vectors encoding different gRNA polynucleotides. In some embodiments, the gRNA vector library comprises at least 70 gRNA vectors encoding different gRNA polynucleotides. In some embodiments, the gRNA vector library comprises at least 80 gRNA vectors encoding different gRNA polynucleotides. In some embodiments, the gRNA vector library comprises at least 90 gRNA vectors encoding different gRNA polynucleotides. In some embodiments, the gRNA vector library comprises at least 100 gRNA vectors encoding different gRNA polynucleotides. In some embodiments, the gRNA vector library comprises at least 200 gRNA vectors encoding different gRNA polynucleotides. In some embodiments, the gRNA vector library comprises at least 300 gRNA vectors encoding different gRNA polynucleotides. In some embodiments, the gRNA vector library comprises at least 400 gRNA vectors encoding different gRNA polynucleotides. In some embodiments, the gRNA vector library comprises at least 500 gRNA vectors encoding different gRNA polynucleotides. In some embodiments, the gRNA vector library comprises at least 1000 gRNA vectors encoding different gRNA polynucleotides. In some embodiments, the gRNA vector library comprises at least 5000 gRNA vectors encoding different gRNA polynucleotides. In some embodiments, the gRNA vector library comprises at least 10000 gRNA vectors encoding different gRNA polynucleotides. In some embodiments, the gRNA vector library comprises at least 15000 gRNA vectors encoding different gRNA polynucleotides. In some embodiments, the gRNA vector library comprises at least 20000 gRNA vectors encoding different gRNA polynucleotides. In some embodiments, the gRNA vector library comprises at least 30000 gRNA vectors encoding different gRNA polynucleotides. In some embodiments, the gRNA vector library comprises at least 40000 gRNA vectors encoding different gRNA polynucleotides. In some embodiments, the gRNA vector library comprises at least 50000 gRNA vectors encoding different gRNA polynucleotides. In some embodiments, the gRNA vector library comprises at least 60000 gRNA vectors encoding different gRNA polynucleotides. In some embodiments, the gRNA vector library comprises at least 70000 gRNA vectors encoding different gRNA polynucleotides. In some embodiments, the gRNA vector library comprises at least 80000 gRNA vectors encoding different gRNA polynucleotides. In some embodiments, the gRNA vector library comprises at least 90000 gRNA vectors encoding different gRNA polynucleotides. In some embodiments, the gRNA vector library comprises at least 100000 gRNA vectors encoding different gRNA polynucleotides. In some embodiments, the gRNA vector library comprises at least 1000000 gRNA vectors encoding different gRNA polynucleotides.

[0192] In some embodiments, the gRNA vector library comprises at least 2 gRNA each comprising a different gRNA polynucleotide homology region that is complementary to a sense strand or an antisense strand of a different gene encoded by any one of SEQ ID NOs: 1-135 or a variant thereof. In some embodiments, the gRNA vector library comprises at least 3 gRNA vectors each comprising a different gRNA polynucleotide homology region that is complementary to a sense strand or an antisense strand of a different gene encoded by any one of SEQ ID NOs: 1-135 or a variant thereof. In some embodiments, the gRNA vector library comprises at least 4 gRNA vectors each comprising a different gRNA polynucleotide homology region that is complementary to a sense strand or an antisense strand of a different gene encoded by any one of SEQ ID NOs: 1-135 or a variant thereof. In some embodiments, the gRNA vector library comprises at least 5 gRNA vectors each comprising a different gRNA polynucleotide homology region that is complementary to a sense strand or an antisense strand of a different gene encoded by any one of SEQ ID NOs: 1-135 or a variant thereof. In some embodiments, the gRNA vector library comprises at least 6 gRNA each comprising a different gRNA polynucleotide homology region that is complementary to a sense strand or an antisense strand of a different gene encoded by any one of SEQ ID NOs: 1-135 or a variant thereof. In some embodiments, the gRNA vector library comprises at least 7 gRNA vectors each comprising a different gRNA polynucleotide homology region that is complementary to a sense strand or an antisense strand of a different gene encoded by any one of SEQ ID NOs: 1-135 or a variant thereof. In some embodiments, the gRNA vector library comprises at least 8 gRNA vectors each comprising a different gRNA polynucleotide homology region that is complementary to a sense strand or an antisense strand of a different gene encoded by any one of SEQ ID NOs: 1-135 or a variant thereof. In some embodiments, the gRNA vector library comprises at least 9 gRNA vectors each comprising a different gRNA polynucleotide homology region that is complementary to a sense strand or an antisense strand of a different gene encoded by any one of SEQ ID NOs: 1-135 or a variant thereof. In some embodiments, the gRNA vector library comprises at least 10 gRNA vectors each comprising a different gRNA polynucleotide homology region that is complementary to a sense strand or an antisense strand of a different gene encoded by any one of SEQ ID NOS: 1-135 or a variant thereof. In some embodiments, the gRNA vector library comprises at least 11 gRNA vectors each comprising a different gRNA polynucleotide homology region that is complementary to a sense strand or an antisense strand of a different gene encoded by any one of SEQ ID NOs: 1-135 or a variant thereof. In some embodiments, the gRNA vector library comprises at least 12 gRNA vectors each comprising a different gRNA polynucleotide homology region that is complementary to a sense strand or an antisense strand of a different gene encoded by any one of SEQ ID NOs: 1-135 or a variant thereof. In some embodiments, the gRNA vector library comprises at least 13 gRNA vectors each comprising a different gRNA polynucleotide homology region that is complementary to a sense strand or an antisense strand of a different gene encoded by any one of SEQ ID NOs: 1-135 or a variant thereof. In some embodiments, the gRNA vector library comprises at least 14 gRNA vectors each comprising a different gRNA polynucleotide homology region that is complementary to a sense strand or an antisense strand of a different gene encoded by any one of SEQ ID NOS: 1-135 or a variant thereof. In some embodiments, the gRNA vector library comprises at least 15 gRNA vectors each comprising a different gRNA polynucleotide homology region that is complementary to a sense strand or an antisense strand of a different gene encoded by any one of SEQ ID NOs: 1-135 or a variant thereof. In some embodiments, the gRNA vector library comprises at least 16 gRNA vectors each comprising a different gRNA polynucleotide homology region that is complementary to a sense strand or an antisense strand of a different gene encoded by any one of SEQ ID NOs: 1-135 or a variant thereof. In some embodiments, the gRNA vector library comprises at least 17 gRNA vectors each comprising a different gRNA polynucleotide homology region that is complementary to a sense strand or an antisense strand of a different gene encoded by any one of SEQ ID NOs: 1-135 or a variant thereof. In some embodiments, the gRNA vector library comprises at least 18 gRNA vectors each comprising a different gRNA polynucleotide homology region that is complementary to a sense strand or an antisense strand of a different gene encoded by any one of SEQ ID NOs: 1-135 or a variant thereof. In some embodiments, the gRNA vector library comprises at least 19 gRNA vectors each comprising a different gRNA polynucleotide homology region that is complementary to a sense strand or an antisense strand of a different gene encoded by any one of SEQ ID NOs: 1-135 or a variant thereof. In some embodiments, the gRNA vector library comprises at least 20 gRNA vectors each comprising a different gRNA polynucleotide homology region that is complementary to a sense strand or an antisense strand of a different gene encoded by any one of SEQ ID NOs: 1-135 or a variant thereof. In some embodiments, the gRNA vector library comprises at least 21 gRNA vectors each comprising a different gRNA polynucleotide homology region that is complementary to a sense strand or an antisense strand of a different gene encoded by any one of SEQ ID NOs: 1-135 or a variant thereof. In some embodiments, the gRNA vector library comprises at least 22 gRNA vectors each comprising a different gRNA polynucleotide homology region that is complementary to a sense strand or an antisense strand of a different gene encoded by any one of SEQ ID NOS: 1-135 or a variant thereof. In some embodiments, the gRNA vector library comprises at least 23 gRNA vectors each comprising a different gRNA polynucleotide homology region that is complementary to a sense strand or an antisense strand of a different gene encoded by any one of SEQ ID NOs: 1-135 or a variant thereof. In some embodiments, the gRNA vector library comprises at least 24 gRNA vectors each comprising a different gRNA polynucleotide homology region that is complementary to a sense strand or an antisense strand of a different gene encoded by any one of SEQ ID NOs: 1-135 or a variant thereof. In some embodiments, the gRNA vector library comprises at least 25 gRNA vectors each comprising a different gRNA polynucleotide homology region that is complementary to a sense strand or an antisense strand of a different gene encoded by any one of SEQ ID NOs: 1-135 or a variant thereof. In some embodiments, the gRNA vector library comprises at least 26 gRNA vectors each comprising a different gRNA polynucleotide homology region that is complementary to a sense strand or an antisense strand of a different gene encoded by any one of SEQ ID NOS: 1-135 or a variant thereof. In some embodiments, the gRNA vector library comprises at least 27 gRNA vectors each comprising a different gRNA polynucleotide homology region that is complementary to a sense strand or an antisense strand of a different gene encoded by any one of SEQ ID NOs: 1-135 or a variant thereof. In some embodiments, the gRNA vector library comprises at least 28 gRNA vectors each comprising a different gRNA polynucleotide homology region that is complementary to a sense strand or an antisense strand of a different gene encoded by any one of SEQ ID NOs: 1-135 or a variant thereof. In some embodiments, the gRNA vector library comprises at least 29 gRNA vectors each comprising a different gRNA polynucleotide homology region that is complementary to a sense strand or an antisense strand of a different gene encoded by any one of SEQ ID NOs: 1-135 or a variant thereof. In some embodiments, the gRNA vector library comprises at least 30 gRNA vectors each comprising a different gRNA polynucleotide homology region that is complementary to a sense strand or an antisense strand of a different gene encoded by any one of SEQ ID NOS: 1-135 or a variant thereof. In some embodiments, the gRNA vector library comprises at least 40 gRNA vectors each comprising a different gRNA polynucleotide homology region that is complementary to a sense strand or an antisense strand of a different gene encoded by any one of SEQ ID NOs: 1-135 or a variant thereof. In some embodiments, the gRNA vector library comprises at least 50 gRNA vectors encoding different gRNA polynucleotides each comprising a different gRNA polynucleotide homology region that is complementary to a sense strand or an antisense strand of a different gene encoded by any one of SEQ ID NOs: 1-135 or a variant thereof. In some embodiments, the gRNA vector library comprises at least 60 gRNA vectors encoding different gRNA polynucleotides each comprising a different gRNA polynucleotide homology region that is complementary to a sense strand or an antisense strand of a different gene encoded by any one of SEQ ID NOs: 1-135 or a variant thereof. In some embodiments, the gRNA vector library comprises at least 70 gRNA vectors encoding different gRNA polynucleotides each comprising a different gRNA polynucleotide homology region that is complementary to a sense strand or an antisense strand of a different gene encoded by any one of SEQ ID NOs: 1-135 or a variant thereof. In some embodiments, the gRNA vector library comprises at least 80 gRNA vectors encoding different gRNA polynucleotides each comprising a different gRNA polynucleotide homology region that is complementary to a sense strand or an antisense strand of a different gene encoded by any one of SEQ ID NOs: 1-135 or a variant thereof. In some embodiments, the gRNA vector library comprises at least 90 gRNA vectors encoding different gRNA polynucleotides each comprising a different gRNA polynucleotide homology region that is complementary to a sense strand or an antisense strand of a different gene encoded by any one of SEQ ID NOs: 1-135 or a variant thereof. In some embodiments, the gRNA vector library comprises at least 100 gRNA vectors encoding different gRNA polynucleotides each comprising a different gRNA polynucleotide homology region that is complementary to a sense strand or an antisense strand of a different gene encoded by any one of SEQ ID NOs: 1-135 or a variant thereof. In some embodiments, the gRNA vector library comprises at least 200 gRNA vectors encoding different gRNA polynucleotides each comprising a different gRNA polynucleotide homology region that is complementary to a sense strand or an antisense strand of a different gene encoded by any one of SEQ ID NOs: 1-135 or a variant thereof. In some embodiments, the gRNA vector library comprises at least 300 gRNA vectors encoding different gRNA polynucleotides each comprising a different gRNA polynucleotide homology region that is complementary to a sense strand or an antisense strand of a different gene encoded by any one of SEQ ID NOs: 1-135 or a variant thereof. In some embodiments, the gRNA vector library comprises at least 400 gRNA vectors encoding different gRNA polynucleotides each comprising a different gRNA polynucleotide homology region that is complementary to a sense strand or an antisense strand of a different gene encoded by any one of SEQ ID NOs: 1-135 or a variant thereof. In some embodiments, the gRNA vector library comprises at least 500 gRNA vectors encoding different gRNA polynucleotides each comprising a different gRNA polynucleotide homology region that is complementary to a sense strand or an antisense strand of a different gene encoded by any one of SEQ ID NOs: 1-135 or a variant thereof. In some embodiments, the gRNA vector library comprises at least 1000 gRNA vectors encoding different gRNA polynucleotides each comprising a different gRNA polynucleotide homology region that is complementary to a sense strand or an antisense strand of a different gene encoded by any one of SEQ ID NOs: 1-135 or a variant thereof. In some embodiments, the gRNA vector library comprises at least 5000 gRNA vectors encoding different gRNA polynucleotides each comprising a different gRNA polynucleotide homology region that is complementary to a sense strand or an antisense strand of a different gene encoded by any one of SEQ ID NOs: 1-135 or a variant thereof. In some embodiments, the gRNA vector library comprises at least 10000 gRNA vectors encoding different gRNA polynucleotides each comprising a different gRNA polynucleotide homology region that is complementary to a sense strand or an antisense strand of a different gene encoded by any one of SEQ ID NOs: 1-135 or a variant thereof.

[0193] In some embodiments, the gRNA vector library comprises at least 15000 gRNA vectors encoding different gRNA polynucleotides each comprising a different gRNA polynucleotide homology region that is complementary to a sense strand or an antisense strand of a different gene encoded by any one of SEQ ID NOs: 1-135 or a variant thereof. In some embodiments, the gRNA vector library comprises at least 20000 gRNA vectors encoding different gRNA polynucleotides each comprising a different gRNA polynucleotide homology region that is complementary to a sense strand or an antisense strand of a different gene encoded by any one of SEQ ID NOs: 1-135 or a variant thereof. In some embodiments, the gRNA vector library comprises at least 30000 gRNA vectors encoding different gRNA polynucleotides each comprising a different gRNA polynucleotide homology region that is complementary to a sense strand or an antisense strand of a different gene encoded by any one of SEQ ID NOS: 1-135 or a variant thereof. In some embodiments, the gRNA vector library comprises at least 40000 gRNA vectors encoding different gRNA polynucleotides each comprising a different gRNA polynucleotide homology region that is complementary to a sense strand or an antisense strand of a different gene encoded by any one of SEQ ID NOs: 1-135 or a variant thereof. In some embodiments, the gRNA vector library comprises at least 50000 gRNA vectors encoding different gRNA polynucleotides each comprising a different gRNA polynucleotide homology region that is complementary to a sense strand or an antisense strand of a different gene encoded by any one of SEQ ID NOs: 1-135 or a variant thereof. In some embodiments, the gRNA vector library comprises at least 60000 gRNA vectors encoding different gRNA polynucleotides each comprising a different gRNA polynucleotide homology region that is complementary to a sense strand or an antisense strand of a different gene encoded by any one of SEQ ID NOs: 1-135 or a variant thereof. In some embodiments, the gRNA vector library comprises at least 70000 gRNA vectors encoding different gRNA polynucleotides each comprising a different gRNA polynucleotide homology region that is complementary to a sense strand or an antisense strand of a different gene encoded by any one of SEQ ID NOs: 1-135 or a variant thereof. In some embodiments, the gRNA vector library comprises at least 80000 gRNA vectors encoding different gRNA polynucleotides each comprising a different gRNA polynucleotide homology region that is complementary to a sense strand or an antisense strand of a different gene encoded by any one of SEQ ID NOS: 1-135 or a variant thereof. In some embodiments, the gRNA vector library comprises at least 90000 gRNA vectors encoding different gRNA polynucleotides each comprising a different gRNA polynucleotide homology region that is complementary to a sense strand or an antisense strand of a different gene encoded by any one of SEQ ID NOs: 1-135 or a variant thereof. In some embodiments, the gRNA vector library comprises at least 100000 gRNA vectors encoding different gRNA polynucleotides each comprising a different gRNA polynucleotide homology region that is complementary to a sense strand or an antisense strand of a different gene encoded by any one of SEQ ID NOs: 1-135 or a variant thereof. In some embodiments, the gRNA vector library comprises at least 1000000 gRNA vectors encoding different gRNA polynucleotides each comprising a different gRNA polynucleotide homology region that is complementary to a sense strand or an antisense strand of a different gene encoded by any one of SEQ ID NOs: 1-135 or a variant thereof.

[0194] In some embodiments, the gRNA vector library comprises 135 gRNA vectors each of the gRNA vectors comprising a first guide RNA polynucleotide that targets a marker protein (e.g., CD3) and a second guide RNA comprising a homology region that is complementary to a sense strand or antisense strand of a gene encoded by any one of SEQ ID NOs: 1-135 or a variant thereof. In some embodiments, the gRNA vector library comprises 1080 gRNA vectors each of the gRNA vectors comprising a first guide RNA polynucleotide that targets a marker protein (e.g., CD3) and a second guide RNA comprising a homology region that is complementary to a sense strand or antisense strand of a gene encoded by any one of SEQ ID NOs: 1-135 or a variant thereof.

[0195] In some embodiments, the gRNA vector library comprises gRNA vectors comprising gRNA polynucleotide homolog regions that are complementary to at least 2 (e.g., at least 3, at least 4, at least 5, at least 6, at least 7, at least 8, at least 9, at least 10, at least 11, at least 12, at least 13, at least 14, at least 15, at least 16, at least 17, at least 18, at least 19 at least 20, at least 21, at least 22, at least 23, at least 24, at least 25, at least 26, at least 27, at least 28, at least 29, at least 30, at least 40, at least 50, at least 60, at least 70, at least 80, at least 90, at least 100, at least 120 or at least 135) gene sequences of any one of SEQ ID NOs: 1-135.

[0196] In some embodiments, the gRNA vector library comprises any one of the guide RNA polynucleotides of any of the compositions described herein. In some embodiments, the gRNA vector library comprises guide RNA polynucleotides comprising any one of SEQ ID NOs: 136-1215 or a variant thereof. In some embodiments, the gRNA vector library comprises guide RNA polynucleotides comprising any one of SEQ ID NOs: 136-1315 or a variant thereof.

### CAR Vector

[0197] In some embodiments, the present application provides vectors comprising a sequence encoding a chimeric antigen receptor (CAR).

### Chimeric Antigen Receptors (CARs)

[0198] The terms “chimeric antigen receptor” or “CAR” or “CARs”, as used herein, refer to engineered T cell receptors, which graft a ligand or antigen specificity onto T cells (for example, naive T cells, central memory T cells, effector memory T cells or combinations thereof). CARs are also known as artificial T cell receptors, chimeric T cell receptors or chimeric immunoreceptors.

[0199] A CAR places a chimeric antigen binding domain that specifically binds a target, e.g., a polypeptide, expressed on the surface of a cell to be targeted for a T cell response onto a construct including a transmembrane domain and intracellular domain(s) of a T cell receptor molecule. In some embodiments, the chimeric antigen binding domain includes the antigen domain(s) of an antibody reagent that specifically binds an antigen expressed on a cell to be targeted for a T cell response. In some embodiments, the chimeric antigen binding domain includes a ligand that specifically binds an antigen expressed on a cell to be targeted for a T cell response.

[0200] As used herein, a “CAR-T cell” or “CAR-T” refers to a T cell that expresses a CAR. When expressed in a T cell, CARs have the ability to redirect T cell specificity and reactivity toward a selected target in a non-MHC-restricted manner, exploiting the antigen binding properties of monoclonal antibodies. The non-MHC-restricted antigen recognition gives T cells expressing CARs the ability to recognize an antigen independent of antigen processing, thus bypassing a major mechanism of tumor escape.

[0201] As used herein, a “CAR-NK cell” or “CAR-NK” refers to a natural killer (NK) cell that expresses a CAR.

[0202] In some embodiments, the CAR excludes a CD8 signal peptide as described herein. As can be determined by those of skill in the art, various functionally similar or equivalent components of these CARs can be swapped or substituted with one another, as well as other similar or functionally equivalent components known in the art or listed herein.

[0203] Any cell-surface moiety can be targeted by a CAR. Often, the target will be a cell-surface polypeptide that may be differentially or preferentially expressed on a cell that one wishes to target for a T cell response. In some embodiments, the extracellular target binding domain binds to any one of CD19, CD37, CD70, CD79b, TACI, BCMA, MUC1, MUC16, B7H3, mesothelin, CD70, PSMA, PSCA, EGFRVIII, claudin6, binds to any pair of CD19/CD79b, BCMA/TACI, or is a TriPRIL antigen binding domain, e.g., as described in PCT/US2020/065733, PCT/US2020/036108, PCT/US2018/013215, PCT/US2018/013213, PCT/US2018/027783, PCT/US2018/013221, PCT/US2018/022974, PCT/US2019/042268, PCT/US2019/038518, PCT/US2019/066357, PCT/US2019/013103, PCT/US2019/017727, PCT/US2020/051018, and/or PCT/US2018/013095.

### Antigen Binding Domain

[0204] As used herein, the term “antigen binding domain” refers to a polypeptide found on the outside of the cell that is sufficient to facilitate binding to a target. The extracellular target binding domain will specifically bind to its binding partner, i.e., the target. As non-limiting examples, the antigen binding domain can include an antigen domain of an antibody or antibody reagent, or a ligand, which recognizes and binds with a cognate binding partner protein. In this context, a ligand is a molecule that binds specifically to a portion of a protein and/or receptor. The cognate binding partner of a ligand useful in the methods and compositions described herein can generally be found on the surface of a cell. Ligand:cognate partner binding can result in the alteration of the ligand-bearing receptor, or activate a physiological response, for example, the activation of a signaling pathway. In some embodiments, the ligand can be non-native to the genome. In some embodiments, the ligand has a conserved function across at least two species.

[0205] Any cell-surface moiety can be targeted by a CAR. In some embodiments, the target will be a cell-surface polypeptide that may be differentially or preferentially expressed on a cell that one wishes to target for a T cell response. To target Tregs, antibody reagents can be targeted against, e.g., Glycoprotein A Repetitions Predominant (GARP), latency-associated peptide (LAP), CD25, CTLA-4, ICOS, TNFR2, GITR, OX40, 4-1BB, and LAG-3.

[0206] In some embodiments, the CAR vector comprises a CAR polynucleotide encoding an antigen binding domain that binds to any one of CD19, CD79b, TACI, BCMA, MUC1, MUC16, B7H3, mesothelin, CD70, PSMA, PSCA, EGFRVIII, claudin6, binds to any pair of CD19/CD79b, BCMA/TACI, or is a TriPRIL antigen binding domain.

[0207] In some embodiments, the CAR vector comprises a CAR comprising an antigen binding domain that binds mesothelin. In some embodiments, the mesothelin CAR comprises a polynucleotide encoding an extracellular binding domain comprising a mesothelin antibody (e.g., scFv). In some embodiments, the mesothelin scFv comprises a VH domain of SEQ ID NO: 1366 and a VL domain of SEQ ID NO: 1367, or a variant thereof. In some embodiments, the mesothelin scFv comprises SEQ ID NO: 1368 or SEQ ID NO: 1369, or a variant thereof.

TABLE 1
Mesothelin antibody sequences

| SEQ ID | | |
|---|---|---|
| NO: | Name | Sequence |
| 1366 | MGHmeso 1 | MECNWILPFILSVTSGVYSEILL |
| | antibody VH | QQTGTVLARPGTSVKMSCKASGY |
| | | TFTNYRMHWVKQRPGQGLEWIGG |
| | | IYPGNSDTNYNQKFKDKAKLTAV |
| | | TSTSTANMELSSLTNEDSAVYYC |
| | | LRGIRGSYFDYWGQGTTLTVSS |
| 1367 | MGHmeso 1 | METDTILLWVLLLWVPGSTGDI |
| | antibody VL | VLTQSPASLAVSLGQRATISCK |
| | | ASQSVDYDGDSYMNWYQQKPGQ |
| | | PPKLLIYAASNLESGIPARFSG |
| | | SGSGTDFTLNIHPVEEEDAATY |
| | | YCQQSNEDPSTFGGGTKLEVK |
| 1368 | MGHmeso 1 | MECNWILPFILSVTSGVYSEIL |
| | scFv (VL- | LQQTGTVLARPGTSVKMSCKAS |
| | VH) | GYTFTNYRMHWVKQRPGQGLEW |
| | | IGGIYPGNSDTNYNQKFKDKAK |
| | | LTAVTSTSTANMELSSLTNEDS |
| | | AVYYCLRGIRGSYFDYWGQGTT |
| | | LTVSSGGGGSGGGGSGGGGSGG |
| | | GGSMETDTILLWVLLLWVPGST |
| | | GDIVLTQSPASLAVSLGQRATI |
| | | SCKASQSVDYDGDSYMNWYQQK |
| | | PGQPPKLLIYAASNLESGIPAR |
| | | FSGSGSGTDFTLNIHPVEEEDA |
| | | ATYYCQQSNEDPSTFGGGTKLE |
| | | VK |
| 1369 | MGHmeso 1 | METDTILLWVLLLWVPGSTGDI |
| | scFv (VH- | VLTQSPASLAVSLGQRATISCK |
| | VL) | ASQSVDYDGDSYMNWYQQKPGQP |
| | | PKLLIYAASNLESGIPARFSGS |
| | | GSGTDFTLNIHPVEEEDAATYY |
| | | CQQSNEDPSTFGGGTKLEVKGG |
| | | GGSGGGGSGGGGSGGGGSMECN |
| | | WILPFILSVTSGVYSEILLQQT |
| | | GTVLARPGTSVKMSCKASGYTF |
| | | TNYRMHWVKQRPGQGLEWIGGI |
| | | YPGNSDTNYNQKFKDKAKLTAV |
| | | TSTSTANMELSSLTNEDSAVYY |
| | | CLRGIRGSYFDYWGQGTTLTVS |
| | | S |

### Hinge and Transmembrane Domains

[0208] In some embodiments, the CAR polypeptide further comprises a transmembrane domain, e.g., a hinge/transmembrane domain, which joins the antigen binding domain to the intracellular signaling domain. The binding domain of the CAR is, in some embodiments, followed by one or more “hinge domains,” which plays a role in positioning the antigen binding domain away from the effector cell surface to enable proper cell/cell contact, antigen binding and activation. A CAR may include one or more hinge domains between the binding domain and the transmembrane domain (TM). The hinge domain may be derived either from a natural, synthetic, semi-synthetic, or recombinant source. The hinge domain can include the amino acid sequence of a naturally occurring immunoglobulin hinge region or an altered immunoglobulin hinge region. Illustrative hinge domains suitable for use in the CARs described herein include the hinge region derived from the extracellular regions of type 1 membrane proteins such as CD8 (e.g., CD8alpha), CD4, CD28, 4-1BB, and CD7, which may be wild-type hinge regions from these molecules or may be altered. In some embodiments, the CAR comprises polynucleotide encoding CD8alpha hinge/transmembrane domain. In some embodiments, the CAR comprises a polynucleotide encoding a 41BB intracellular domain.

[0209] In some embodiments, the hinge region is derived from the hinge region of an immunoglobulin like protein (e.g., lgA, lgD, lgE, lgG, or lgM), CD28, or CD8. In some embodiments, the hinge domain includes a CD8a hinge region.

[0210] As used herein, “transmembrane domain” (TM domain) refers to the portion of the CAR that fuses the extracellular binding portion, in some embodiments via a hinge domain, to the intracellular portion (e.g., the costimulatory domain and intracellular signaling domain) and anchors the CAR to the plasma membrane of the immune effector cell. The transmembrane domain is a generally hydrophobic region of the CAR, which crosses the plasma membrane of a cell. The TM domain can be the transmembrane region or fragment thereof of a transmembrane protein (for example a Type I transmembrane protein or other transmembrane protein), an artificial hydrophobic sequence, or a combination thereof. While specific examples are provided herein and used herein, other transmembrane domains will be apparent to those of skill in the art and can be used in connection with alternate embodiments of the technology. A selected transmembrane region or fragment thereof would preferably not interfere with the intended function of the CAR.

[0211] As used in relation to a transmembrane domain of a protein or polypeptide, “fragment thereof” refers to a portion of a transmembrane domain that is sufficient to anchor or attach a protein to a cell surface.

[0212] In some embodiments, the transmembrane domain or fragment thereof of the CAR described herein includes a transmembrane domain selected from the transmembrane domain of an alpha, beta or zeta chain of a T cell receptor, CD28, CD3 epsilon, CD45, CD4, CD5, CD8, CD9, CD16, CD22, CD33, CD37, CD64, CD80, CD86, CD134, CD137, CD154, KIRDS2, OX40, CD2, CD27, LFA-1 (CD11a, CD18), ICOS (CD278), 4-1BB (CD137), 4-1BBL, GITR, CD40, BAFFR, HVEM (LIGHTR), SLAMF7, NKp80 (KLRFI), CD160, CD19, IL2R beta, IL2R gamma, IL7R a, ITGA1, VLA1, CD49a, ITGA4, IA4, CD49D, ITGA6, VLA-6, CD49f, ITGAD, CD11d, ITGAE, CD103, ITGAL, CD11a, LFA-1, ITGAM, CD11b, ITGAX, CD11c,

ITGB1, CD29, ITGB2, CD18, LFA-1, ITGB7, TNFR2, DNAM1 (CD226), SLAMF4 (CD244, 2B4), CD84, CD96 (Tactile), CEACAM1, CRT AM, Ly9 (CD229), CD160 (BY55), PSGL1, CD100 (SEMA4D), SLAMF6 (NTB-A, Ly108), SLAM (SLAMF1, CD150, IPO-3), BLAME (SLAMF8), SELPLG (CD162), LTBR, PAG/Cbp, NKp44, NKp30, NKp46, NKG2D, and/or NKG2C.

[0213] As used herein, a “hinge/transmembrane domain” refers to a domain including both a hinge domain and a transmembrane domain. For example, a hinge/transmembrane domain can be derived from the hinge/transmembrane domain of CD8, CD28, CD7, or 4-1BB. In some embodiments, the hinge/transmembrane domain of a CAR or fragment thereof is derived from or includes the hinge/transmembrane domain of CD8 (e.g., any one of SEQ ID NOs: 1, or variants thereof). CD8 is an antigen preferentially found on the cell surface of cytotoxic T lymphocytes. CD8 mediates cell-cell interactions within the immune system, and acts as a T cell co-receptor. CD8 consists of an alpha (CD8alpha or CD8a) and beta (CD813 or CD8b) chain. CD8a sequences are known for a number of species, e.g., human CD8a, (NCBI Gene ID: 925) polypeptide (e.g., NCBI Ref Seq NP 001139345.1) and mRNA (e.g., NCBI Ref Seq NM_000002.12). CD8 can refer to human CD8, including naturally occurring variants, molecules, and alleles thereof. In some embodiments of any of the aspects, e.g., in veterinary applications, CD8 can refer to the CD8 of, e.g., dog, cat, cow, horse, pig, and the like.

[0214] Homologs and/or orthologs of human CD8 are readily identified for such species by one of skill in the art, e.g., using the NCBI ortholog search function or searching available sequence data for a given species for sequence similar to a reference CD8 sequence.

[0215] In some embodiments, the CD8 hinge and transmembrane sequence corresponds to the amino acid sequence of SEQ ID NO: 1371 (TTTPAPRPPTPAPTIASQPLSLRPEACRPAAGGA VHTRGLDFACDIYIWAPLAGTCGVLLLSLVITLYC); or includes the sequence of SEQ ID NO: 1; or includes a sequence with at least 75%, at least 80%, at least 85%, at least 90%, at least 91%, at least 92%, at least 93%, at least 94%, at least 95%, at least 96%, at least 97%, at least 98%, at least 99%, or at least 100% sequence identity to the sequence of SEQ ID NO: 1371.

### Co-Stimulatory Domains

[0216] Each CAR described herein optionally includes the intracellular domain of one or more co-stimulatory molecule or co-stimulatory domain. As used herein, the term “co-stimulatory domain” refers to an intracellular signaling domain of a co-stimulatory molecule. Co-stimulatory molecules are cell surface molecules other than antigen receptors or Fe receptors that provide a second signal required for efficient activation and function of T lymphocytes upon binding to antigen. The co-stimulatory domain can be, for example, the co-stimulatory domain of 4-1BB, CD27, CD28, or OX40. In one example, a 4-1BB intracellular domain (ICD) can be used (see, e.g., below and SEQ ID NOs: 1372 (KRGRKKLLYIFKQPFMRPVQTTQEEDGCSCRFPEE EEGGCEL), or variants thereof). Additional illustrative examples of such co-stimulatory molecules include CARD11, CD2, CD7, CD27, CD28, CD30, CD40, CD54 (ICAM), CD83, CD134 (OX40), CD137 (4-1BB), CD150 (SLAMF1), CD152 (CTLA4), CD223 (LAG3), CD270 (HVEM), CD273 (PD-L2), CD274 (PD-L1), CD278 (ICOS), DAP10, LAT, NKD2C SLP76, TRIM, and ZAP70. In some embodiments, the intracellular domain is the intracellular domain of 4-1 BB. 4-1 BB (CD137; TNFRS9) is an activation induced costimulatory molecule, and is an important regulator of immune responses.

[0217] 4-1BB is a membrane receptor protein, also known as CD137, which is a member of the tumor necrosis factor (TNF) receptor superfamily. 4-1BB is expressed on activated T lymphocytes. 4-1BB sequences are known for a number of species, e.g., human 4-1 BB, also known as TNFRSF9 (NCBI Gene 25 ID: 3604) and mRNA (NCBI Reference Sequence: NM_001561.5). 4-1BB can refer to human 4-1BB, including naturally occurring variants, molecules, and alleles thereof. In some embodiments of any of the aspects, e.g., in veterinary applications, 4-1BB can refer to the 4-1BB of, e.g., dog, cat, cow, horse, pig, and the like. Homologs and/or orthologs of human 4-1BB are readily identified for such species by one of skill in the art, e.g., using the NCBI ortholog search function or searching available sequence data for a given species for sequence similar to a reference 4-1 BB sequence.

### Intracellular Signaling Domains

[0218] In some embodiments, the CAR comprises a polynucleotide encoding a CD3zeta intracellular signaling domain.

[0219] The properties of the intracellular signaling domain(s) of the CAR can vary as known in the art and as disclosed herein, but the chimeric target/antigen binding domains(s) render the receptor sensitive to signaling activation when the chimeric target/antigen binding domain binds the target/antigen on the surface of a targeted cell.

[0220] With respect to intracellular signaling domains, so-called “first-generation” CARs include those that solely provide CD3-zeta signals upon antigen binding. So-called “second-generation” CARs include those that provide both co-stimulation (e.g., CD28 or CD137) and activation (CD3-zeta;) domains, and so-called “third-generation” CARs include those that provide multiple costimulatory (e.g., CD28 and CD137) domains and activation domains (e.g., CD3-zeta). In various embodiments, the CAR is selected to have high affinity or avidity for the target/antigen—for example, antibody-derived target or antigen binding domains will generally have higher affinity and/or avidity for the target antigen than would a naturally occurring T cell receptor. This property, combined with the high specificity one can select for an antibody provides highly specific T cell targeting by CAR-T cells.

[0221] CARs as described herein include an intracellular signaling domain. An “intracellular signaling domain” refers to the part of a CAR polypeptide that participates in transducing the message of effective CAR binding to a target antigen into the interior of the immune effector cell to elicit effector cell function, e.g., activation, cytokine production, proliferation and cytotoxic activity, including the release of cytotoxic factors to the CAR-bound target cell, or other cellular responses elicited following antigen binding to the extracellular CAR domain. In various examples, the intracellular signaling domain is from CD3-zeta; (see, e.g., below). Additional non-limiting examples of immunoreceptor tyrosine-based activation motif (ITAM)-containing intracellular signaling domains that are of particular use in the technology include those derived from TCR-zeta, FcR-gamma, FcR-beta, CD3-gamma, CD3-theta, CD3-sigma, CD3-eta, CD3-epsilon, CD3-zeta, CD22, CD79a, CD79b, and CD66d.

[0222] CD3 is a T cell co-receptor that facilitates T lymphocyte activation when simultaneously engaged with the appropriate co-stimulation (e.g., binding of a co-stimulatory molecule). A CD3 complex consists of 4 distinct chains; mammalian CD3 consists of a CD3-gamma chain, a CD3delta chain, and two CD3-epsilon chains.

[0223] These chains associate with a molecule known as the T cell receptor (TCR) and the CD3-zeta to generate an activation signal in T lymphocytes. A complete TCR complex includes a TCR, CD3-zeta, and the complete CD3 complex.

[0224] In some embodiments of any aspect, a CAR polypeptide described herein includes an intracellular signaling domain that includes an Immunoreceptor Tyrosine-based Activation Motif or ITAM from CD3-zeta, including variants of CD3-zeta such as ITAM-mutated CD3-zeta, CD3-eta, or CD3-theta. In some embodiments of any aspect, the ITAM includes three motifs of ITAM of CD3-zeta (ITAM3). In some embodiments of any aspect, the three motifs of ITAM of CD3-zeta are not mutated and, therefore, include native or wild-type sequences. In some embodiments, the CD3-zeta sequence includes the sequence of a CD3-zeta as set forth in the sequences provided herein, e.g., a CD3-zeta sequence of SEQ ID NO: 1373 (RVKFSRSADAPAYQQGQNQLYNELNLGRREEYDVLDKRRGRDPEMGGKPRRKNP QEGLYNELQKDKMAEAYSEIGMKGERRRGKGHDGLYQGLSTATKDTYDALHMQA LPPR), or variants thereof.

[0225] For example, a CAR polypeptide described herein includes the intracellular signaling domain of CD3-zeta. In some embodiments, the CD3-zeta intracellular signaling domain corresponds to an amino acid sequence of SEQ ID NO: 1373 or includes a sequence of SEQ ID NOs: 1373; or includes a sequence with at least 75%, at least 80%, at least 85%, at least 90%, at least 91%, at least 92%, at least 93%, at least 94%, at least 95%, at least 96%, at least 97%, at least 98%, at least 99%, or at least 100% sequence identity to a sequence of SEQ ID NOs: 1373.

[0226] In some embodiments, the intracellular domain is the intracellular domain of a 4-1 BB. In some embodiments, the 4-1BB intracellular domain corresponds to an amino acid sequence selected from SEQ ID NO: 2; or includes a sequence selected from SEQ ID NO: 2; or includes at least 75%, at least 80%, at least 85%, 35 at least 90%, at least 95%, at least 96%, at least 97%, at least 98%, at least 99%, or at least 100% sequence identity to a sequence selected from SEQ ID NO: 2.

[0227] Individual CAR and other construct components as described herein can be used with one another and swapped in and out of various constructs described herein, as can be determined by those of skill in the art. Each of these components can include or consist of any of the corresponding sequences set forth herein, or variants thereof.

[0228] A more detailed description of CARs and CAR-T cells can be found in Maus et al., Blood 123:2624-2635, 2014; Reardon et al., Neuro-Oncology 16:1441-1458, 2014; Hoyos et al., Haematologica 97:1622, 2012; Byrd et al., J. Clin. Oncol. 32:3039-3047, 2014; Maher et al., Cancer Res 69:4559-4562, 2009; and Tamada et al., Clin. Cancer Res. 18:6436-6445, 2012; each of which is incorporated by reference herein in its entirety.

### Signal Peptide

[0229] In some embodiments, a CAR polypeptide as described herein includes a signal peptide. Signal peptides can be derived from any protein that has an extracellular domain or is secreted. A CAR polypeptide as described herein may include any signal peptides known in the art. In some embodiments, the CAR polypeptide includes a CD8 signal peptide, e.g., a CD8 signal peptide corresponding to the amino acid sequence of SEQ ID NO: 1374 (MALPVTALLLPLALLLHAARP), or including the amino acid sequence of SEQ ID NO: 5, or including an amino acid sequence having at least 75%, at least 80%, at least 85%, at least 90%, at least 91%, at least 92%, at least 93%, at least 94%, at least 95%, at least 96%, at least 97%, at least 98%, at least 99%, or at least 100% sequence identity to the sequence of SEQ ID NO: 1374.

[0230] In further embodiments, a CAR polypeptide described herein may optionally exclude one of the signal peptides described herein, e.g., a CD8 signal peptide of SEQ ID NO: 1374 or an lgK signal peptide of SEQ ID NO: 1375 (METDTLLLWVLLLWVPGSTGD).

### Linker Domain

[0231] In some embodiments, the CAR further includes a linker domain. As used herein, “linker domain” refers to an oligo- or polypeptide region from about 2 to 100 amino acids in length, which links together any of the domains/regions of the CAR as described herein. In some embodiment, linkers can include or be composed of flexible residues such as glycine and serine so that the adjacent protein domains are free to move relative to one another. Linker sequences useful for the invention can be from 2 to 100 amino acids, 5 to 50 amino acids, 10 to 15 amino acids, 15 to 20 amino acids, or 18 to 20 amino acids in length, and include any suitable linkers known in the art. For instance, linker sequences useful for the invention include, but are not limited to, glycine/serine linkers, e.g., GGGSGGGSGGGS (SEQ ID NO: 1376) and Gly4Ser (G4S) (SEQ ID NO: 1378) linkers such as (G4S) 3 (GGGGSGGGGSGGGGS (SEQ ID NO: 1377)) and (G4S) 4 (GGGGSGGGGSGGGGSGGGGS (SEQ ID NO: 1378)); the linker sequence of GSTSGSGKPGSGEGSTKG (SEQ ID NO: 1379) as described by Whitlow et al., Protein Eng. 6 (8): 989-95, 1993, the contents of which are incorporated herein by reference in its entirety; the linker sequence of GGSSRSSSSGGGGSGGGG (SEQ ID NO: 1380) as described by Andris-Widhopf et al., Cold Spring Harb. Protoc. 2011 (9), 2011, the contents of which are incorporated herein by reference in its entirety; as well as linker sequences with added functionalities, e.g., an epitope tag or an encoding sequence containing Cre-Lox recombination site as described by Sblattero et al., Nat. Biotechnol. 18 (1): 75-80, 2000, the contents of which are incorporated herein by reference in its entirety. Longer linkers may be used when it is desirable to ensure that two adjacent domains do not sterically interfere with one another.

[0232] Furthermore, linkers may be cleavable or non-cleavable. Examples of cleavable linkers include 2A linkers (e.g., P2A (SEQ ID NO: 1381, GSGATNFSLLKQAGDVEENPGP) and T2A (SGGGGEGRGSLLTCGDVEENPGPR, SEQ ID NO: 1382), 2A-like linkers or functional equivalents thereof and combinations thereof.

[0233] For example, a P2A linker sequence can correspond to the amino acid sequence of SEQ ID NO: 1381. In various examples, linkers having sequences as set forth herein, or variants thereof, are used. It is to be understood that the indication of a particular linker in a construct in a particular location does not mean that only that linker can be used there. Rather, different linker sequences (e.g., P2A and T2A) can be swapped with one another (e.g., in the context of the constructs of the present invention), as can be determined by those of skill in the art. In some embodiments, the linker region is T2A derived from Thosea asigna virus. Non-limiting examples of linkers that can be used in this technology include T2A, P2A, E2A, BmCPV2A, and BmlFV2A. Linkers such as these can be used in the context of polyproteins, such as those described below. For example, they can be used to separate a CAR component of a polyprotein from a therapeutic agent (e.g., an antibody, such as a scFv, single domain antibody (e.g., a camelid antibody), or a bispecific antibody (e.g., a TEAM)) component of a polyprotein (see below).

### Full CARS

[0234] In some embodiments, the CAR is selected from a group consisting of (1) a CAR that binds to any one of CD19, CD79b, TACI, BCMA, MUC1, MUC16, B7H3, mesothelin, CD70, PSMA, PSCA, EGFRvIII, claudin6, (2) a CAR that binds to any pair of CD19/CD79b, BCMA/TACI, or (3) is a TriPRIL antigen binding domain. In some embodiments, the CAR polypeptide comprises an amino acid sequence with at least 75%, at least 80%, at least 85%, at least 90%, at least 91%, at least 92%, at least 93%, at least 94%, at least 95%, at least 96%, at least 97%, at least 98%, at least 99% or greater sequence identity of a sequence of any one of SEQ ID NOs: 1325-1365. In some embodiments, the CAR comprises an amino acid sequence of any one of SEQ ID NOs: 1325-1365. In some embodiments, the CAR polypeptide consists of an amino acid sequence of any one of SEQ ID NOs: 1325-1365. In some embodiments, the CAR polypeptide comprises an amino acid sequence of any one of SEQ ID NOs: 1325-1365.

[0235] In some embodiments, the CAR comprises a polynucleotide encoding a Mesothelin scFv, a CD8alpha hinge/transmembrane, a 41BB intracellular domain, and a CD3zeta signaling domains. In some embodiments, the CAR polypeptide comprises an amino acid sequence with at least 75%, at least 80%, at least 85%, at least 90%, at least 91%, at least 92%, at least 93%, at least 94%, at least 95%, at least 96%, at least 97%, at least 98%, at least 99% or greater sequence identity to a sequence of any one of SEQ ID NOs: 1325-1328. In some embodiments, the CAR comprises an amino acid sequence of any one of SEQ ID NOS: 1325-1328. In some embodiments, the CAR polypeptide comprises an amino acid sequence of any one of SEQ ID NOs: 1325-1328.

### CAR Vectors

[0236] In some embodiments, the CAR vector is a viral vector as described above. In some embodiments, the CAR vector is an adeno-associated vector, a retro-viral vector, or a lentiviral vector. In some embodiments, the CAR vector is a self-inactivating vector (a self-inactivating lentiviral vector or a self-inactivating retro-viral vector). In some embodiments, the CAR vector is a third-generation self-inactivating (SIN) lentiviral vector. In some embodiments, the CAR is operably linked to a promoter. In some embodiments, the promoter is a constitutively active promoter. In some embodiments, the promoter is a chemically inducible promoter. In some embodiments, the promoter is a weak constitutively active promoter. In some embodiments, the promoter is a promoter described herein. In some embodiments, the promoter is a EF1a or EF1a-short promoter.

[0237] In some embodiments, the CAR vector comprises a suicide gene. A “suicide gene” may refer to a gene, that upon transcription or translation, will result in cell death. Thus, suicide genes may be included on the CAR vector to deactivate CAR therapy after treatment is complete or if the subject has adverse side effects. In some embodiments, the suicide gene is selected from the group consisting of icaspase9, tEGFR, tCD29, CD20, and tHer2. In some embodiments, the CAR vector comprises a selectable marker (e.g., a reporter). In some embodiments, the selectable marker is selected from the group consisting of truncated CD34, tEGFR, tCD19, tCD20, tCD34, and tHer2. In some embodiments, the selected marker is CD34 or LNGFR.

[0238] In some embodiments, the CAR vector comprises a 2A ribosomal skip element or an internal ribosome entry site (IRES) between the CAR polynucleotide sequence and the selectable marker sequence.

[0239] In some embodiments, the CAR vector further comprises a nucleotide sequence encoding a CRISPR protein as described herein. In some embodiments, the CAR vector does not comprise a nucleotide sequence encoding a CRISPR protein.

[0240] In some embodiments, the CAR vector comprises a CAR selected from the groups consisting of (1) a CAR that binds to any one of CD19, CD79b, TACI, BCMA, MUC1, MUC16, B7H3, mesothelin, CD70, PSMA, PSCA, EGFRVIII, claudin6, (2) a CAR that binds to any pair of CD19/CD79b, BCMA/TACI, or (3) is a TriPRIL antigen binding domain.

[0241] In some embodiments, the CAR vector comprises a polynucleotide sequence that is at least 85%, at least 90%, at least 91%, at least 92%, at least 93%, at least 94%, at least 95%, at least 96%, at least 97%, at least 98%, at least 99%, or at least 100% identical to SEQ ID NO: 1319. In some embodiments, the CAR vector comprises a polynucleotide sequence of SEQ ID NO: 1319.

### CAR-T Cells, NK-Cells and Mutant Libraries Cell Libraries

[0242] In some aspects the disclosure is directed to an immune cell (e.g., a CAR-T cell or a CAR-NK cell) comprising a guide RNA vector described herein and/or comprising a mutation in a gene corresponding to the gene sequence of any one of SEQ ID NOs: 1-135. The disclosure is directed, in part, to the idea of introducing one or more mutations into an immune cell by contacting the immune cell with a guide RNA vector and providing a CRISPR protein (e.g., as part of the guide RNA vector or encoded on a separate vector). Expression of the guide RNA vector and a CRISPR protein can result in a mutation in the immune cell in or proximal to a sequence complementary to a homology region of a gRNA polynucleotide encoded by the gRNA vector. Accordingly, the disclosure is directed to immune cells comprising the guide RNA vector, immune cells comprising a mutation produced by action of the one or more gRNA polynucleotides encoded by the guide RNA vector and a CRISPR protein, and immune cells comprising both thereof. In some embodiments, the immune cell comprises (i) a guide RNA vector and/or a mutation in a gene corresponding to the gene sequence of any one of SEQ ID NOs: 1-135; and (ii) a CAR vector as described herein. In some embodiments, the immune cell comprises one, two, or three of: a mutation in a gene corresponding to the gene sequence of any one of SEQ ID NOs: 1-135 or a variant thereof, a gRNA polynucleotide as described herein, a plasmid as described herein, or a gRNA vector as described herein. In some embodiments, the mammalian cell further comprises a CAR vector as described herein. In some embodiments, the mammalian cell further comprises an mRNA encoding a CAR and/or a polypeptide encoding a CAR.

[0243] In some embodiments, the immune cell comprises a mutation in a gene corresponding to the gene sequence of any one of SEQ ID NOs: 1-135 or a variant thereof. In some embodiments, the mutation is a result of CRISPR cleavage of a gene. In some embodiments, the mutation is a loss of function mutation. In some embodiments, the mutation in a single nucleotide polymorphism. In some embodiments, the mutation is a transversion. In some embodiments, the mutation is a transition. In some embodiments, the mutation changes the protein sequence of the target gene. In some embodiments, the mutations introduces an early stop codon. In some embodiments, the mutation is an insertion or deletion. In some embodiments, the immune cell comprises a gRNA polynucleotide as described herein. In some embodiments, the immune cell comprises a gRNA vector as described herein. In some embodiments, the immune cell further comprises a CAR vector as described herein. In some embodiments, the immune cell comprises a CAR as described herein.

[0244] In some embodiments, the immune cell comprising a gRNA vector and a CAR vector further comprises selected markers (e.g., reporters as described herein). In some embodiments, the immune cell is CD34 positive and CD3 negative. In some embodiments, the immune cell is CD34 positive, CD3 negative and LNGFR positive.

[0245] The immune cell or tissue can be of human, primate, hamster, rabbit, rodent, cow, pig, sheep, horse, goat, dog or cat origin, and any other immune cell may be used. In some embodiments, the immune cell is human.

[0246] In some embodiments, the mammalian cell is an immune cell. As used herein, “immune cell” refers to a cell that plays a role in the immune response. Immune cells are of hematopoietic origin, and include T cells and natural killer (NK) cells. In some embodiments, the immune cell is a T cell. In some embodiments, the immune cell is a NK cell.

[0247] In some embodiments, the immune cell is obtained from an individual having or diagnosed as having cancer, a plasma cell disorder, or autoimmune disease. T cells can be obtained from a subject using standard techniques known in the field. For example, T cells can be isolated from peripheral blood taken from a donor or patient. T cells can be isolated from a mammal. Preferably, T cells are isolated from a human. In some embodiments, the immune cell is collected from a subject using leukapheresis.

[0248] In some embodiments, the immune cell is activated. In some embodiments, the immune cell is an activated T cell comprising a gRNA vector and a CAR vector. Methods of activating T cells are well known in the art. In some embodiments, activating n T cell comprises contacting the T cell with an anti-CD3 antibody. In some embodiments, activating n T cell comprises contacting the T cell with an anti-CD28 antibody. In some embodiments, activating a T cell comprises contacting the T cell with interleukin-2 (IL-2). In some embodiments, activating a T cell comprises contacting the T cell with Phytohemagglutinin (PHA). In some embodiments, activating a T cell comprises contacting the T cell with an anti-CD28 antibody and an anti-CD3 antibody. In some embodiments, activating a T cell comprises contacting the T cell with an anti-CD3 antibody and interleukin-2 (IL2). In some embodiments, activating a T cell comprises contacting the T cell with an anti-CD3 antibody, interleukin-2 (IL2) and Phytohemagglutinin (PHA). In some embodiments, any one of an anti-CD3 antibody, an anti-CD28 antibody, interleukin-2 (IL-2) and/or Phytohemagglutinin (PHA) are soluble when activating a T cell. In some embodiments, activating a T cell comprises contacting the T cell with an anti-CD3 antibody, interleukin-2 (IL2) and Phytohemagglutinin (PHA). In some embodiments, any one of an anti-CD3 antibody, an anti-CD28 antibody, interleukin-2 (IL-2) and/or Phytohemagglutinin (PHA) are fixed to a solid medium (e.g., a cell plate) when activating a T cell.

[0249] In some embodiments, the immune cell (e.g., T cell) does not comprise a DNA sequence encoding a CRISPR protein (e.g., Cas9).

[0250] In some embodiments, a plurality of immune cells (e.g., T cell or NK cells) are transfected with (1) a CAR vector and (2) a gRNA library as described herein to produce a mutant CAR-T cell library. Methods of immune cell transfection are well known in the art as described in Fus-Kujawa et al., “Frontiers in Bioengineering and Biotechnology (2021): 634, which is incorporated by reference in its entirety.

[0251] One advantage of using separate vectors to encode the CAR and the gRNA polynucleotides is the ability to control the multiplicity of infection (MOI) of the CAR and gRNA separately. Multiplicity of infection may refer to how many of a given vector enter into a cell. For example, and MOI of 1 indicates that the average number of a given vector per T cell in the mutant CAR-T cell library would be 1. In some embodiments, an MOI may be a target MOI based on the amount of vector transfected. In some embodiments, CAR-T cell efficacy may be dependent on the amount of CAR expressed in the cell. CAR expression may be controlled by increasing the number of CAR vector transfected per cell (e.g., increasing the MOI). However, in some embodiments, the skilled person may want to increase the MOI of the CAR vector but not the MOI of the gRNA vector because when more than one gRNA vector is transfected per cell then confounding results can be returned from having multiple different mutation made in the same cell. Therefore, in some embodiments, the MOI of the gRNA vector is less than 1 and the MOI of the CAR vector is greater than 1. In some embodiments, the gRNA library is transfected into the plurality of T cells at a multiplicity of infection (MOI) between 0.1-1, 0.2-1, 0.3-1, 0.4-1, 0.5-1, 0.6-1, 0.7-1, 0.8-1, 0.3-1, 0.4-0.9, 0.5-0.8, or 0.6-0.07. In some embodiments, the MOI of the gRNA vector is less than 1. In some embodiments, the MOI of the CAR vector is at least 1 (e.g., at least 2, at least 3, at least 4, at least 5, at least 10, at least 15 or at least 20). In some embodiments, the MOI of the CAR vector is between 1-3, 1-5, 1-10, 1-20, 5-10, 5-15, 5-20, or 10-20.

[0252] A “mutant CAR-T cell library” may refer to a two or more CAR-T cells, wherein at least two of the two or more CAR-T cells comprises a CAR (e.g., a CAR vector) and a gRNA vector, wherein the at least two of the two or more CAR-T cells comprises gRNA vectors encoding different guide RNAs. In some embodiments, at least 2 (e.g., at least 3, at least 4, at least 5, at least 6, at least 7, at least 8, at least 9, at least 10, at least 15, at least 20, at least 25, at least 50, at least 100, or at least 135) CAR-T cells of the library each comprise a different gRNA polynucleotide comprising a homology region that is complementary to a different gene sequence of any one of SEQ ID NOs: 1-135 or a variant thereof. In some embodiments, the CAR-T cell library comprises a gRNA vector described herein. In some embodiments, a CAR-T cell of the mutant CAR-T cell library comprises any one of SEQ ID NOs: 236-1315. In some embodiments, the mutant CAR-T cell library comprises any one of the compositions comprising gRNA polynucleotides described herein. In some embodiments, the mutant CAR-T cell library comprises at least 2 (e.g., at least 3, at least 4, at least 5, at least 6, at least 7, at least 8, at least 9, at least 10, at least 11, at least 12, at least 13, at least 14, at least 15, at least 16, at least 17, at least 18, at least 19, at least 20, at least 25, at least 50, at least 75, at least 100, at least 250, at least 500, at least 750, or at least 1000) of the gRNA homology region sequences of any one of SEQ ID NOs: 236-1315. In some embodiments, the mutant CAR-T cell library comprises SEQ ID NOs: 236-1315.

### Methods

[0253] In some aspects, the disclosure provides a method of producing a mutant immune cell library. In some embodiments, the immune cell library comprises T cells (a mutant CAR-T cell library). In some embodiments, the immune cell library comprises NK cells (a mutant CAR-NK cell library). In some embodiments, cells of the library comprise a CAR or vector encoding a CAR (e.g., a mutant CAR-T cell library or mutant CAR-NK cell library).

### Producing Mutant CAR-T Cell Libraries

[0254] In some aspects, the disclosure provides a method of producing a mutant CAR-T cell library. In some embodiments, the method comprises: (a) obtaining CAR-T cells (e.g., CAR-T cells previously made), and (b) transfecting the T cells with the gRNA vector library (e.g., as described herein). In some embodiments, the obtained CAR-T cells have been previously activated. In some embodiments, the method comprises activating the CAR-T cells. In some embodiments, the CAR-T cells express a CRISPR protein. In some embodiments, the method further comprises introducing a CRISPR protein encoding mRNA or a CRISPR protein into the CAR-T cells (e.g., by electroporation).

[0255] In some embodiments, the method comprises: (a) activating T cells (e.g., as described above (e.g., using anti-CD3 and anti-CD28 antibodies)), (b) transfecting the T cells with the gRNA vector library (e.g., as described herein) (c) transfecting the T cells with the CAR vector (e.g., as described herein), and (d) introducing a CRISPR protein encoding mRNA or a CRISPR protein into the T cell (e.g., by electroporation).

[0256] In some embodiments, the CRISPR protein is any suitable CRISPR protein for mutating DNA in CAR-T cells. In some embodiments, the CRISPR protein is any CRISPR protein described herein. In some embodiments, introducing a CRISPR protein encoding mRNA or a CRISPR protein into the T cell is performed 1-10 days after transfection of the gRNA vector and/or the CAR vector. In some embodiments, introducing a CRISPR protein encoding mRNA or a CRISPR protein into the T cell is performed 3-7 days after transfection of the gRNA vector and/or the CAR vector. In some embodiments, introducing a CRISPR protein encoding mRNA or a CRISPR protein into the T cell is performed 1, 2, 3, 4, 5, 6, 7, 8, 9, 10, 11, 12, 13, 14, or 16 days after transfection of the gRNA vector and/or the CAR vector. In some embodiments, the CRISPR protein introduced is a CRISPR protein. In some embodiments, the CRISPR protein introduced is introduced as a ribonucleoprotein. In some embodiments, the CRISPR protein encoded on the gRNA vector or the CAR vector.

[0257] In some embodiments, the method further comprises collecting T cells from a subject, e.g., that may then be modified using, e.g., one or more (e.g., all) of steps (a)-(d) described above. As used herein, a “subject” means a human or animal. Usually the animal is a vertebrate such as a primate, rodent, domestic animal or game animal. Primates include, for example, chimpanzees, cynomolgus monkeys, spider monkeys, and macaques, e.g., rhesus. Rodents include, for example, mice, rats, woodchucks, ferrets, rabbits and hamsters. Domestic and game animals include, for example, cows, horses, pigs, deer, bison, buffalo, feline species, e.g., domestic cat, canine species, e.g., dog, fox, wolf, avian species, e.g., chicken, emu, ostrich, and fish, e.g., trout, catfish and salmon. In some embodiments, the subject is a mammal, e.g., a primate, e.g., a human. In some embodiments, the subject is a human. In some embodiments, the subject is laboratory model organisms (e.g., a mouse). The terms, “individual,” “patient,” and “subject” are used interchangeably herein. Preferably, the subject is a mammal. The mammal can be a human, non-human primate, mouse, rat, dog, cat, horse, or cow, but is not limited to these examples. Mammals other than humans can be advantageously used as subjects that represent animal models of disease, e.g., cancer. A subject can be male or female. A subject can be one who has been previously diagnosed with or identified as suffering from or having a condition in need of treatment (e.g., a pancreatic cancer, a lung cancer, an ovarian cancer, endometrial cancer, biliary cancer, gastric cancer, or mesothelioma or another type of cancer expressing an antigen target by the antigen binding domain of the CAR) or one or more complications related to such a condition, and optionally, have already undergone treatment for the condition or the one or more complications related to the condition. Alternatively, a subject can also be one who has not been previously diagnosed as having such condition or related complications. For example, a subject can be one who exhibits one or more risk factors for the condition or one or more complications related to the condition or a subject who does not exhibit risk factors. A “subject in need” of treatment for a particular condition can be a subject having that condition, diagnosed as having that condition, or at risk of developing that condition.

[0258] In some embodiments, the subject has been diagnosed with cancer. “Cancer” as used herein can refer to a hyperproliferation of cells whose unique trait, loss of normal cellular control, results in unregulated growth, lack of differentiation, local tissue invasion, and metastasis. Exemplary cancers include, but are not limited to, glioblastoma, prostate cancer, glioma, leukemia, lymphoma, multiple myeloma, or a solid tumor, e.g., lung cancer and pancreatic cancer. Nonlimiting examples of leukemia include acute myeloid leukemia (AML), chronic myeloid leukemia (CML), acute lymphocytic leukemia (ALL), and chronic lymphocytic leukemia (CLL). In some embodiments, the cancer is ALL or CLL. Non-limiting examples of lymphoma include diffuse large B-cell lymphoma (DLBCL), follicular lymphoma, small lymphocytic lymphoma (SLL), mantle cell lymphoma (MCL), marginal zone lymphomas, Burkitt's lymphoma, hairy cell leukemia (HCL), and T cell lymphoma (e.g., peripheral T cell lymphoma (PTCL), including cutaneous T cell lymphoma (CTCL) and anaplastic large cell lymphoma (ALCL)). In some embodiments, the cancer is DLBCL or follicular lymphoma. Non-limiting examples of solid tumors include adrenocortical tumor, alveolar soft part sarcoma, carcinoma, chondrosarcoma, colorectal carcinoma, desmoid tumors, desmoplastic small round cell tumor, endocrine tumors, endodermal sinus tumor, epithelioid hemangioendothelioma, Ewing sarcoma, germ cell tumors (solid tumor), giant cell tumor of bone and soft tissue, hepatoblastoma, hepatocellular carcinoma, melanoma, nephroma, neuroblastoma, non-rhabdomyosarcoma soft tissue sarcoma (NRSTS), osteosarcoma, paraspinal sarcoma, renal cell carcinoma, retinoblastoma, rhabdomyosarcoma, synovial sarcoma, and Wilms tumor. In some embodiments, the cancer expresses mesothelin. In some embodiments, the cancer in uterine cancer. Solid tumors can be found in bones, muscles, or organs, and can be sarcomas or carcinomas. It is contemplated that any aspect of the technology described herein can be used to treat all types of cancers, including cancers not listed in the instant application. As used herein, the term “tumor” refers to an abnormal growth of cells or tissues, e.g., of malignant type or benign type.

[0259] In some embodiments, the T cells are collected using any suitable method. In some embodiments, the T cells are collected from the subject. In some embodiments, the T cell are collected from a healthy subject. In some embodiments, the T cells are collected by in vitro production (e.g., from induced pluripotent stem cells or embryonic stem cells). In some embodiments, the T cell are collected from a subject using Leukapheresis.

[0260] In some embodiments, the method further comprises purifying T cells that comprise a CAR vector and comprise a gRNA vector. In some embodiments, the methods of purifying may be performed based on the selectable molecule (e.g., reporters) as described above. For example, the CAR vector may express a selectable marker (e.g., CD34t) and the gRNA vector may express a selected marker (e.g., knockout of CD3). In some embodiments, purification can be performed using anti-body based magnetic selection. In some embodiments, purification can be performed using flow cytometry. In some embodiments, purification can be performed using CliniMACS In some embodiments, CAR-T cells with CRISPR activity are purified based on knockout of a gene for negative selection (e.g., CD3). In some embodiments, CAR-T cells expressing a CAR are selected for based on positive selection (e.g., expression CD34). In some embodiments, the success of transduction may be determined using flow cytometry based on the number of CD34+CD-LNGF+ cells.

[0261] In some embodiments, the gRNA vector library is transfected into the CAR-T cells with a MOI as described herein. In some embodiments, the CAR vector is transfected with an MOI as described herein.

[0262] In some embodiments, the present application discloses a mutant CAR-T cell library produced using any of the methods described herein.

### Identifying CRISPR Effects on CAR-T Cell Function.

[0263] In some embodiments, disclosure provides a method for identifying mutated (e.g., by CRISPR) CAR-T cells that have increased efficacy.

[0264] In some aspects the present application discloses a method of identifying gRNA polynucleotides associated with CAR-T cell efficacy in vivo comprising: (a) administering to a subject a mutant CAR-T cell library (e.g., a mutant CAR-T cell library disclosed herein or produced by a method described herein), (b) collecting one or more samples comprising a plurality of mutant CAR-T cells from the subject (e.g., via leukapheresis), (c) sequencing the gRNA polynucleotides from the mutant CAR-T cells collected in (b) (e.g., using any reasonable method, for example Illumina sequencing), and (d) evaluating the change in relative abundance of each gRNA polynucleotide based on the sequencing in (c). For example, a gRNA associated with CAR-T cell efficacy is a gRNA that induces a mutation which increases CAR-T cell proliferation and/or tumor toxicity. The skilled person will understand that an increase in relative abundance of a given gRNA after administration of a mutant CAR-T cell library to a subject indicates that the given gRNA causes a mutation that increases CAR-T cell efficacy (e.g., increase persistence).

[0265] The skilled person will understand that mutant CAR-T cells (e.g., of the mutant CAR-T cell library) may replicate in the subject. Thus, the plurality of mutant CAR-T cells collected in step b above may comprise mutant CAR-T cells that were administered to the subject and/or descendants of mutant CAR-T cells that were administered to the subject.

[0266] In some embodiments, the methods described herein relate to treating a subject having or diagnosed as having cancer, a plasma cell disease or disorder, or an autoimmune disease or disorder with a immune cell including any of the CAR polypeptides (and optional antibody reagents or cytokines) described herein, or a nucleic acid encoding any of the CAR polypeptides (and optional antibody reagents or cytokines) described herein. The CAR-T cells described herein include immune cells including any of the CAR polypeptides (and optional antibody reagents or cytokines) described herein, or a nucleic acid encoding any of the CAR polypeptides (and optional antibody reagents or cytokines) described herein.

[0267] The compositions described herein can be administered to a subject having or diagnosed as having a condition (e.g., cancer). As used herein, a “condition” refers to a cancer, a plasma cell disease or disorder, or an autoimmune disease or disorder. Subjects having a condition can be identified by a physician using current methods of diagnosing the condition. Symptoms and/or complications of the condition, which characterize these conditions and aid in diagnosis are well known in the art and include but are not limited to, fatigue, persistent infections, and persistent bleeding. Tests that may aid in a diagnosis of, e.g., the condition, but are not limited to, blood screening and bone marrow testing, and are known in the art for a given condition. A family history for a condition, or exposure to risk factors for a condition can also aid in determining if a subject is likely to have the condition or in making a diagnosis of the condition.

[0268] In some embodiments, the methods described herein include administering an effective amount of activated CAR-T cells (e.g., a mutant CAR-T cell library) described herein to a subject to identify mutant CAR-T cells that have increased efficacy. In some embodiments, the methods described herein include administering an effective amount of activated CAR-T cells (e.g., a mutant CAR-T cell library) described herein to a subject in order to alleviate a symptom of the condition. As used herein, “alleviating a symptom of the condition” is ameliorating any condition or symptom associated with the condition. As compared with an equivalent untreated control, such reduction is by at least 5%, 10%, 20%, 40%, 50%, 60%, 80%, 90%, 95%, 99% or more as measured by any standard technique. A variety of means for administering the compositions described herein to subjects are known to those of skill in the art. In some embodiments, the compositions described herein are administered systemically or locally. In a preferred embodiment, the compositions described herein are administered intravenously. In another embodiment, the compositions described herein are administered at the site of a tumor.

[0269] The term “effective amount” as used herein may refers to the number of immune cells (e.g. activated CAR-T cells or CAR-NK cells) needed to alleviate at least one or more symptom of the disease or disorder, and relates to a sufficient amount of the cell preparation or composition to provide the desired effect. The term “therapeutically effective amount” therefore may refer to an amount of activated immune cells (e.g., CAR-T cells or NK-cells) that is sufficient to provide a particular anti-condition effect when administered to a typical subject. An effective amount as used herein, in various contexts, would also include an amount sufficient to delay the development of a symptom of the disease, alter the course of a symptom disease (for example but not limited to, slowing the progression of a condition), or reverse a symptom of the condition. Thus, it is not generally practicable to specify an exact “effective amount.” However, for any given case, an appropriate “effective amount” can be determined by one of ordinary skill in the art using only routine experimentation.

[0270] Effective amounts, toxicity, and therapeutic efficacy can be evaluated by standard pharmaceutical procedures in cell cultures or experimental animals. The dosage can vary depending upon the dosage form employed and the route of administration utilized. The dose ratio between toxic and therapeutic effects is the therapeutic index and can be expressed as the ratio LD50/ED50. Compositions and methods that exhibit large therapeutic indices are preferred. A therapeutically effective dose can be estimated initially from cell culture assays. Also, a dose can be formulated in animal models to achieve a circulating plasma concentration range that includes the IC50 (i.e., the concentration of activated CAR-T cells, which achieves a half-maximal inhibition of symptoms) as determined in cell culture, or in an appropriate animal model. Levels in plasma can be measured, for example, by high performance liquid chromatography. The effects of any particular dosage can be monitored by a suitable bioassay, e.g., assay for bone marrow testing, among others. The dosage can be determined by a physician and adjusted, as necessary, to suit observed effects of the treatment.

[0271] Modes of administration can include, for example intravenous (iv) injection or infusion. The compositions described herein can be administered to a patient transarterially, intratumorally, intranodally, intraperitoneally or intramedullary. the In some embodiments, the compositions of T cells may be injected directly into a tumor, lymph node, or site of infection. In some embodiments, the compositions described herein are administered into a body cavity or body fluid (e.g., ascites, pleural fluid, peritoneal fluid, or cerebrospinal fluid).

[0272] In a particular exemplary aspect, subjects may undergo leukapheresis, wherein leukocytes are collected, enriched, or depleted ex vivo to select and/or isolate the cells of interest, e.g., T cells. These T cell isolates can be expanded by contact with an artificial APC, e.g., an aAPC expressing anti-CD28 and anti-CD3 CDRs, and treated such that one or more CAR constructs of the technology may be introduced, thereby creating a CAR-T cell. These methods may further comprise transfecting the CAR-T cells with a gRNA library as described herein.

[0273] In some embodiments, a single treatment regimen is required. In others, administration of one or more subsequent doses or treatment regimens can be performed. For example, after treatment biweekly for three months, treatment can be repeated once per month, for six months or a year or longer. In some embodiments, no additional treatments are administered following the initial treatment.

[0274] The dosage of a composition as described herein can be determined by a physician and

adjusted, as necessary, to suit observed effects of the treatment. With respect to duration and frequency of treatment, it is typical for skilled clinicians to monitor subjects in order to determine when the treatment is providing therapeutic benefit, and to determine whether to administer further cells, discontinue treatment, resume treatment, or make other alterations to the treatment regimen. The dosage should not be so large as to cause adverse side effects, such as cytokine release syndrome. Generally, the dosage will vary with the age, condition, and sex of the patient and can be determined by one of skill in the art. The dosage can also be adjusted by the individual physician in the event of any complication.

[0275] In some embodiments, the mutant CAR-T cell library administered to the subject comprises a genome-wide CAR-T cell mutant library. A genome-wide CAR-T cell mutant library may refer to a plurality of CAR-T cells that have been transfected with a gRNA library that comprises at least one guide RNA targeting each gene in the genome of the CAR-T cells. In some embodiments, a genome-wide CAR-T cell mutant library comprises a plurality of CAR-T cells that have been transfected with a gRNA library that comprises at least one guide RNA targeting each protein encoding gene in the genome of the CAR-T cells. Genome-wide T cell CRISPR libraries and methods of use in vitro cells systems are described in Shifrut et al., Cell 175.7 (2018): 1958-1971.

[0276] In some embodiments, the mutant CAR-T cell library comprises negative control CAR-T cells. In some embodiments, the negative control CAR-T cells comprises a CAR vector as described herein and a negative control gRNA as described herein. In some embodiments, the negative control CAR-T cells comprise an empty CAR vector that does not encode a CAR. In some embodiments, the negative control CAR-T cells comprise a CAR that does not comprises an antigen binding domain. In some embodiments, the negative control CAR-T cells comprise a CAR that comprises an antigen binding domain that does not bind to a protein expressed by the subject.

[0277] In some embodiments, the subject is any suitable subject including a subject described herein. In some embodiments, the subject is human (e.g., a human subject as described herein). In some embodiments, the subject has cancer (e.g., a cancer described herein). In some embodiments, the cancer is selected from the group consisting of ovarian cancer, pancreatic cancer, lung cancer, prostate cancer, breast cancer, AML, multiple myeloma, or B cell lymphomas)

[0278] In some embodiments, the CAR comprises an antigen binding domain that binds to an antigen expressed by the cancer (e.g., an antigen binding domain as described herein). In some embodiments, the CAR comprises an antigen binding domain that binds to any one of CD19, CD79b, TACI, BCMA, MUC1, MUC16, B7H3, mesothelin, CD70, PSMA, PSCA, EGFRvIII, claudin6, binds to any pair of CD19/CD79b, BCMA/TACI, or is a TriPRIL antigen binding domain. In some embodiments, the antigen binding domain binds to mesothelin.

[0279] In some embodiments, the one or more samples collected from the subject are collected for any reasonable tissue or bodily fluid using any reasonable means. In some embodiments, the one or more samples are collected from a bodily fluid (e.g., cerebrospinal fluid, blood or a blood product). In some embodiments, the blood product is serum or plasma. In some embodiments, the one or more samples are collected from bone marrow. In some embodiments, the one or more samples are collected from a tissue (e.g., heart, lung, liver, pancreas, brain, skin, intestine, kidney, spleen, lymph node, thyroid, muscle, fat, gull bladder, or tonsils).

[0280] In some embodiments, sample collection is performed using any reasonable means, including, but not limited to venipuncture, apheresis, tissue biopsy or resection of tumor.

[0281] In some embodiments, one sample is collected from the subject. In some embodiments, 1, 2, 3, 4, 5, 6, 7, 8, 9, 10, 11, 12, 13, 14, 15, or more samples (e.g., blood samples) are collected from the subject. In some embodiments, at least 2 (e.g., at least 3, at least 4, at least 5, at least 6, at least 7, at least 8, at least 9, at least 10, at least 11, at least 12, at least 13, at least 14, or at least 15) samples (e.g., blood samples) are collected from the subject. In some embodiments, 1-2, 1-2, 1-3, 1-4, 1-5, 1-6, 1-7, 1-8, 1-9, 1-10, 1-15, 2-3, 2-5, 2-7, 2-10, 2-12, 2-15, 3-5, 3-7, 3-10, 3-12, or 3-15 samples are collected from a subject. In some embodiments, at least 5 samples are collected via venipuncture, apheresis, or resection of tumor.

[0282] In some embodiments, samples are collected from the subject at one or more of day 1, 2, 3, 4, 5, 6, 7, 8, 9, 10, 11, 12, 13, 14, 15, 16, 17, 18, 19, 20, 21, 22, 23, 24, 25, 26, 27, 28, 29, 30, or day 31 after step (a). In some embodiments, samples are collected from the subject at one or more of week 1, 2, 3, 4, 5, 6, 7, 8, 9, 10, 11, 12, 13, 14, 15, 16, 17, 18, 19, 20, 21, 22, 23, 24, 25, 26, 27, 28, 29, or 30 after step (a). In some embodiments, samples are collected from the subject at one or more of month 1, 2, 3, 4, 5, 6, 7, 8, 9, 10, 11, 12 after step (a). In some embodiments, samples are collected from the subject at day 3, day 7, day 10, day 14, day 21, day 28, month 2, month 3, and month 6 after step (a).

[0283] In some embodiments, the method further comprises extracting mutant CAR-T cells from the sample(s) prior to sequencing. Methods for isolating CAR-T cells from samples (e.g., bodily fluids) are well known in the art. For example, leukapheresis is a known method for extracting CAR-T cell from a subject. Other methods may include immune precipitation, immunomagnetic selection, microfluidics, and flow cytometry sorting. These methods are described in Chiu et al., Scientific Reports 9.1 (2019): 1-10, which is incorporated by reference in its entirety. In some embodiments, extraction of mutant CAR-T cell from a sample is performed based on cell surface markers expressed by the mutant CAR-T cell. In some embodiments, extraction is performed by isolating T cells that are CD3 negative, CD34 positive, and optionally LNGFR positive.

[0284] In some embodiments, the method further comprises extracting genomic DNA from the mutant CAR-T cells. In some embodiments, genomic DNA is extracted from a single mutant CAR-T cell or a clonal population of a mutant CAR-T cell. In some embodiments, the method comprises sequences the extracted genomic DNA to determine the mutation caused by the CRISPR guide RNA in a given CAR-T cell. Alternatively, in some embodiments, the method comprises using primers to amplify the region of the genome expected to comprise a CRISPR induced mutation (e.g., based on the sequence of the gRNA homology region), and sequencing that region.

[0285] In some embodiments, the method further comprising isolating the RNA from the mutant CAR-T cells. In some embodiments, the RNA is isolated from single mutant CAR-T cells (e.g., for single cell RNA sequencing). In some embodiments, the isolated RNA from the mutant CAR-T cell is sequenced (e.g., using illumine sequencing).

[0286] In some embodiments, the method comprises sequencing the gRNA polynucleotides in the mutant CAR-T cells extracted from the subject. In some embodiments, the method involves extracting DNA from the mutant CAR-T cells. The skilled person will understand that DNA can be extracted from a pool of mutant CAR-T cells collected from the subject. In other words, in some embodiments, DNA from each CAR-T cell does not need to be separately isolated from each mutant CAR-T cell collected from the subject to determine the effects of a CRISPR mutation on CAR-T cell efficacy. Rather, the guide RNA homology region sequences may be used to identify which gene is expected to be mutated by CRISPR and the expected location of the mutation in the gene because the guide RNA homology regions may have a sequence that is complementary to a specific region of a specific gene.

[0287] Thus, in some embodiments, the method further comprises using primers to amplify the gRNA polynucleotides of the mutant CAR-T cells to produce amplicons of any thereof, and these amplicons are used for sequencing. In some embodiments, the gRNA polynucleotides amplified are genomic DNA, vector DNA, or RNA. In some embodiments, universal primers may be used to amplify all of the guide RNA polynucleotides in the mutant CAR-T cell library. In some embodiments, the universal primers comprising a universal forward primer and a universal reverse primer. In some embodiments, the forward and reverse primer are designed to bind to regions of the gRNA vector and/or the gRNA polynucleotide that are the same. For example, in some embodiments, the universal forward primer binds to the gRNA polynucleotide upstream of the homology region. In some embodiments, the universal reverse primer binds to the gRNA polynucleotide downstream of the homology region. In some embodiments, the universal forward primer comprises the sequence of SEQ ID NO: 1324. In some embodiments, the forward primer and reverse primer comprise phosphorothioate modifications. In some embodiments, the universal forward primer comprises a stagger sequence (e.g., a sequence of variable length in the primer to improve resolution of next-generation sequencing). Stagger sequences are also known in the art, e.g., as described in Wohlhieter et al., STAR Protocols 2.2 (2021): 100390. In some embodiments, the stagger sequence comprises any one of C, GC, AGC, CAAC, TGCACC, ACGCAAC, and TGAAGACCC. In some embodiments, the universal reverse primer comprises a stagger sequence.

[0288] In some embodiments, the universal reverse primer comprises the sequence of SEQ ID NO: 1325.

[0289] In some embodiments, the gRNA polynucleotides or amplicons thereof are sequenced. Sequencing of the gRNA polynucleotides, amplicons thereof, or any other sequencing described herein may be performed using any suitable method or apparatus, including, but not limited to Next-generation sequencing, Illumina™ sequencing, Ion Torrent™ sequencing, PacBio™ sequencing, nanopore sequencing, 454 sequencing, sanger sequencing, and SoLid™ sequencing.

[0290] In some embodiments, the method comprises evaluating the change in relative abundance of each gRNA polynucleotide based on the sequencing. In some embodiments, relative abundance of each gRNA polynucleotide is based on the number of time a given gRNA polynucleotide is observed is the sequencing data before the mutant CAR-T cell library is administered to the patient and after the mutant CAR-T cell library is extracted from the patient. In some embodiments, in some embodiments, the relative abundance of a given guide RNA in the sequencing data polynucleotide is determined over time (e.g., in each sample collected). The relative abundance of a given guide RNA may be indicative of the efficacy of the CAR-T cell.

[0291] In some embodiments, the method comprising determining a fold change value by comparing the average gRNA polynucleotide abundance for any given gene in the post-infusion sample (extracted from a subject) to its abundance in the pre-infusion sample (prior to administration to the subject). In some embodiments, the threshold for identifying significant fold changes in gRNA polynucleotide abundance is based on z-score normalization the distribution of fold change values. In some embodiments, changes of greater than 2 standard deviations from the mean of the z-score distribution are considered significant.

[0292] In some embodiments, the efficacy of each mutant CAR-T cell is evaluated based on persistence in vivo and tumor cytotoxicity. The terms “persistence” or “CAR-T cell persistence” as used herein refer to the ability of a CAR-T cell to stay activated, continue to proliferate, and/or not die. Persistence may be measured based on the relative abundance of a mutant CAR-T cell overtime because proliferation and death of a mutant CAR-T cell would be expected to alter the relative abundance of the mutant CAR-T cell. Thus, a mutant CAR-T cell with increased relative abundance may also have increased persistence.

[0293] In some embodiments, persistence in vivo and tumor cytotoxicity are measured using flow cytometry and PCR. In some embodiments, quantifying persistence is performed by calculating the relative change in each gRNA over time. In some embodiments, quantifying persistence is performed by calculating the relative change in each gRNA over time compared to a gRNA polynucleotide from a negative control CAR-T cell. In some embodiments, quantifying persistence is performed by calculating the relative change in each gRNA over time across at least 3 timepoints and calculating a slope of relative change. In some embodiments, tumor cytotoxicity is quantified using clinical imaging and/or bone marrow evaluation.

[0294] In some embodiments, mutant CAR-T cell persistence is determined based on relative abundance then mutant CAR-T cells with high relative abundance are tested for cancer killing efficacy (e.g., in vitro or in vivo).

[0295] In some embodiments, efficacy is measured for the entire mutant CAR-T Cell library that is administered to the patient. For example, if the patient show sign of improvement (e.g., decreased tumor or cancer burden, increased lifespan, etc.) after administration of a mutant CAR-T cell library then the library as a whole may be efficacious.

### Producing Mutant NK Cell Libraries

[0296] In some embodiments, the methods described herein to produce mutant CAR-NK cell libraries can be adapted to produce mutant natural killer cell libraries. In some embodiments, the method comprising transfecting a gRNA vector library into a plurality of NK cells (e.g., CAR-NK cells) extracted from a subject (e.g., using a method described herein). In some embodiments, the NK cells are also transfected with a CAR vector as described herein.

[0297] In some aspects, the disclosure provides a method of producing a mutant CAR-NK cell library. In some embodiments, the method comprises: (a) obtaining CAR-NK cells (e.g., CAR-NK cells previously made), and (b) transfecting the CAR-NK cells with the gRNA vector library (e.g., as described herein). In some embodiments, the obtained CAR-NK cells have been previously activated. In some embodiments, the method comprises activating the CAR-NK cells. In some embodiments, the CAR-NK cells express a CRISPR protein. In some embodiments, the method further comprises introducing a CRISPR protein encoding mRNA or a CRISPR protein into the CAR-NK cells (e.g., by electroporation).

[0298] In some aspects, the present application discloses a method of producing a mutant CAR-NK cell library comprising: (a) activating NK cells (e.g., as described above (e.g., using anti-CD3 and anti-CD28 antibodies)), (b) transfecting the NK cells with the gRNA vector library as described above (c) transfecting the NK cells with the CAR vector of any one of claims as described above, and (d) introducing a CRISPR protein encoding mRNA or a CRISPR protein into the NK cell (e.g., by electroporation).

[0299] In some embodiments, the CRISPR protein is any suitable CRISPR CAR for mutating DNA in CAR-NK cells. In some embodiments, the CRISPR protein is any CRISPR protein described herein. In some embodiments, introducing a CRISPR protein encoding mRNA or a CRISPR protein into the NK cell is performed 1-10 days after transfection of the gRNA vector and/or the CAR vector. In some embodiments, introducing a CRISPR protein encoding mRNA or a CRISPR protein into the NK cell is performed 3-7 days after transfection of the gRNA vector and/or the CAR vector. In some embodiments, the CRISPR protein introduced is a CRISPR Cas9 protein. In some embodiments, the CRISPR protein introduced is introduced as a ribonucleoprotein. In some embodiments, the CRISPR protein mRNA is expressed from the gRNA vector or the CAR vector.

[0300] In some embodiments, the method further comprises collecting NK cells from a subject e.g., that may then be modified using, e.g., one or more (e.g., all) of steps (a)-(d) described above (e.g., a subject as described above).

[0301] In some embodiments, the NK cells are collected using any suitable method (e.g., including any suitable method described above).

[0302] In some embodiments, the method further comprises purifying NK cells that comprise a CAR vector and comprise a CRISPR induced gene mutation (e.g., including any suitable purifying method described above).

[0303] In some embodiments, the gRNA vector library is transduced into the CAR-NK cells with a MOI as described above. In some embodiments, the CAR vector is transduced with an MOI as described above.

[0304] In some embodiments, the present application discloses a mutant CAR-NK cell library produced using any of the methods described herein.

### Identifying CRISPR Effects on CAR-NK Cell Function.

[0305] In some embodiments, the disclosure provides a methods for identifying mutated (e.g., by CRISPR) CAR-NK cells that have increased efficacy.

[0306] In some aspects the present application discloses a method of identifying gRNA polynucleotides associated with CAR-NK cell efficacy in vivo comprising: (a) administering to a subject a mutant CAR-NK cell library (e.g., a mutant CAR-NK cell library disclosed herein or produced by a method described herein), (b) collecting one or more samples comprising a plurality of mutant CAR-NK cells from the subject (e.g., via leukapheresis), (c) sequencing the gRNA polynucleotides from the mutant CAR-NK cells collected in (b) (e.g., using any reasonable method, for example Illumina sequencing), and (d) evaluating the change in relative abundance of each gRNA polynucleotide based on the sequencing in (c). For example, a gRNA associated with CAR-NK cell efficacy is a gRNA that induces a mutation which increases CAR-NK cell proliferation and/or tumor toxicity. The skilled person will understand that an increase in relative abundance of a given gRNA after administration of a mutant CAR-NK cell library to a subject indicates that the given gRNA causes a mutation that increases CAR-NK cell efficacy (e.g., increase persistence).

[0307] The skilled person will understand that mutant CAR-NK cells (e.g., of the mutant CAR-NK cell library) may replicate in the subject. Thus, the plurality of mutant CAR-NK cells collected in step b above may comprise mutant CAR-NK cells that were administered to the subject and/or descendants of mutant CAR-NK cells that were administered to the subject.

[0308] The CAR-NK cells described herein include immune cells including any of the CAR polypeptides (and optional antibody reagents or cytokines) described herein, or a nucleic acid encoding any of the CAR polypeptides (and optional antibody reagents or cytokines) described herein.

[0309] In some embodiments, the methods described herein include administering an effective amount of activated CAR-NK cells (e.g., a mutant CAR-NK cell library) described herein to a subject to identify mutant CAR-NK cells that have increased efficacy. In some embodiments, the methods described herein include administering an effective amount of activated CAR-NK cells (e.g., a mutant CAR-NK cell library) described herein to a subject in order to alleviate a symptom of the condition.

[0310] In some embodiments, the compositions of NK cells may be administered to subject as described above (e.g., in the same or similar manner as performed using mutant CAR-T cells).

[0311] In some embodiments, the mutant CAR-NK cell library administered to the subject comprises a genome-wide CAR-NK cell mutant library (e.g., a genome-wide generated using a genome wide gRNA vector library as described above for mutant CAR-T cells).

[0312] In some embodiments, the CAR of the CAR-NK cell comprises an antigen binding domain that binds to an antigen expressed by the cancer (e.g., an antigen binding domain as described herein). In some embodiments, the CAR comprises an antigen binding domain that binds to any one of CD19, CD79b, TACI, BCMA, MUC1, MUC16, B7H3, mesothelin, CD70, PSMA, PSCA, EGFRVIII, claudin6, binds to any pair of CD19/CD79b, BCMA/TACI, or is a TriPRIL antigen binding domain. In some embodiments, the antigen binding domain binds to Mesothelin.

[0313] In some embodiments, the one or more samples collected from the subject are collected for any reasonable tissue or bodily fluid using any reasonable means as described above.

[0314] In some embodiments, method of collecting mutant CAR-NK cells from a subject, extracting genomic DNA and RNA from CAR-NK-cells, amplifying and/or sequencing gRNA polynucleotides, determining relative abundance, and determining CAR-NK-cell efficacy are described above in relation to CAR-T cells and may be similarly used with CAR-NK-cells.

[0315] All patents and other publications; including literature references, issued patents, published patent applications, and co-pending patent applications; cited throughout this application are expressly incorporated herein by reference for the purpose of describing and disclosing, for example, the methodologies described in such publications that might be used in connection with the technology described herein. These publications are provided solely for their disclosure prior to the filing date of the present application. Nothing in this regard should be construed as an admission that the inventors are not entitled to antedate such disclosure by virtue of prior technology or for any other reason. All statements as to the date or representation as to the contents of these documents is based on the information available to the applicants and does not constitute any admission as to the correctness of the dates or contents of these documents.

[0316] The description of embodiments of the disclosure is not intended to be exhaustive or to limit the disclosure to the precise form disclosed. While specific embodiments of, and examples for, the disclosure are described herein for illustrative purposes, various equivalent modifications are possible within the scope of the disclosure, as those skilled in the relevant art will recognize. For example, while method steps or functions are presented in a given order, alternative embodiments may perform functions in a different order, or functions may be performed substantially concurrently. The teachings of the disclosure provided herein can be applied to other procedures or methods as appropriate. The various embodiments described herein can be combined to provide further embodiments. Aspects of the disclosure can be modified, if necessary, to employ the compositions, functions and concepts of the above references and application to provide yet further embodiments of the disclosure. Moreover, due to biological functional equivalency considerations, some changes can be made in protein structure without affecting the biological or chemical action in kind or amount. These and other changes can be made to the disclosure in light of the detailed description. All such modifications are intended to be included within the scope of the appended claims.

[0317] Specific elements of any of the foregoing embodiments can be combined or substituted for elements in other embodiments. Furthermore, while advantages associated with certain embodiments of the disclosure have been described in the context of these embodiments, other embodiments may also exhibit such advantages, and not all embodiments need necessarily exhibit such advantages to fall within the scope of the disclosure.

[0318] The technology described herein is further illustrated by the following examples, which in no way should be construed as being further limiting.

### EXAMPLES

### Example 1: Vector Design for gRNA Vector and CAR Vector

[0319] Two different vectors were designed that together would provide CAR expression and positive selection using a clinically-feasible magnetic bead system, and expression of two guides, a suicide gene, and a selectable marker that would enable specific CRISPR/Cas9 knockout of two genes, one of which is to be used for negative selection with said clinically-feasible magnetic bead system.

[0320] The CAR vector was composed of the backbone of a third-generation self-inactivating (SIN) lentiviral vector (FIG. 1A). A promoter (for example, EF1a) was used to drive expression of the CAR. A 2A ribosomal skip element follows the CAR sequence, and was followed by a reporter gene detectable and selectable by staining for surface expression (truncated CD34, which lacks an intracellular domain).

[0321] The double-guide vector backbone (e.g., gRNA vector) enabled the use of a library of guides. The vector backbone encoded 2 guides; one was static (TRAC) and enabled knockout of the TCR/CD3 complex on gene-edited T cells; the absence of CD3 enabled clinically-feasible negative selection, selecting the effector population in which successful transduction and gene editing with CRISPR/Cas9 occurred. In this exemplary embodiment, the guide RNAs on the vector were inverted; in another embodiment, the two guides are configured in a tandem manner (FIG. 1B).

[0322] EF1a and EF1a-short (EFS) were used for CAR and reporter expression. Expression of the reporter gene LNGFR and suicide gene was driven by a weaker promoter (PGK) to avoid overexpression of the suicide gene which could be leaky and trigger apoptosis of the cell product.

[0323] The CAR vector and double-guide vector are co-transduced into the same population of T cells. The final ‘active’ investigational product of interest is CAR+CD34+LNGFR+CD3− T cells. For enhanced safety, a suicide gene (for example, icaspase9) may be included in the dual-guide vector.

### Example 2: GRNA Library Design and Production

### Selection of Genes

[0324] Using genomic, transcriptional, and functional data from human and murine T cells, an initial list of 135 genes amenable to CRISPR/Cas9 knockout and hypothesized to improve CAR-T cell functions were selected (Table 2). These genes included checkpoint proteins (e.g., PD-1, encoded by PDCD1), as well as genes observed to be mutated in subjects having lymphoproliferative diseases or subjects with unusual responses to CAR-T cells (e.g., TET2 and cbl-b).

Determining sgRNA Library Size

[0325] Library size was calculated based on feasibility of manufacturing and dose of cells to be administered (typically 100×106), and the number of cells that can reasonably be recovered from a patient post-infusion (typically 50×106-100×106). Targeting the entire genome would result in suboptimal depth and a low signal:noise ratio. On the other hand, targeting <10 genes would be less informative as to which candidate gene knockouts are optimal. Targeting 100-500 genes, with redundancy in guides to enhance signal:noise ratio, provides depth of coverage, decreases randomness due to number of T cells recovered post-infusion, and yet presents a competitive system within and among different patients to rigorously assess the effects of a variety of candidate genes. The library also includes controls that target genes which are expected to have any effect on T cell biology.

sgRNA Library Design

[0326] For the 135 genes selected, a library of 8 sgRNAs per gene was designed using the dominant transcript ID in human T cells for each gene (e.g. encoded by SEQ ID NOs: 1-135). These transcripts were used to design all possible guides using CRISPick. A total of 34,318 guides were designed. These guides were scored for on-target activity using Rule Set 3 (RS3) with sequence and target information and the Chen2013 tracr (PMID: 24360272). The guides were also scored for off-target activity using Tier-agnostic 1 mismatch aggregated CFD scores. 2009 guides were filtered out based on cloning incompatibility (e.g., BsmBI sites) and polyTs. Five guides had >10000 off-target sites with 1 mismatch. 277 guides were filtered out that had off-targets in 58 tumor suppressor genes as defined by Lenoir et al. Nature communications 12.1 (2021): 1-15. 118 guides that were flagged for targeting a region of the genome with high variation in the human population were also filtered out. 5561 guides that targeted outside 2-85% protein window were also filtered out. To avoid promiscuous guides, 4771 guides with aggregated Cutting Frequency Determination (CFD) scores ≤0.27 were filtered out.

[0327] After all the filtering was applied, the top 8 guides per gene were selected by RS3 scores. This library has a total of 1080 gene targeting guides (Table 4). 100 validated intergenic controls were also included, bringing the total number of guides to 1180.

sgRNA Library Production

[0328] To generate the sgRNA library, oligos for each sgRNA are synthesized on a chip and then amplified using PCR primers containing BsmBI-compatible cloning sequences. The amplified oligo pool is ligated into the sgRNA vector described above and the ligation product is transformed into electrocompetent E. coli. Transformed E. coli are then plated on solid agar at a density to achieve 1000-fold representation of each sgRNA in the library and grown overnight. Colonies are scraped from plates and pooled sgRNA plasmid is extracted. The plasmid library is sequenced to confirm sgRNA representation and then retransformed into electrocompetent E. coli and stored frozen in glycerol media. Aliquots of glycerol-preserved E. coli are then grown overnight in liquid culture and plasmid is extracted from expanded E. coli. Pooled sgRNA library lentivirus prepared using standard 3rd generation lentiviral vector production.

### Example 3: Producing and Administering a Mutant CAR-T Cell Library

[0329] T cells are collected from human subjects via standard leukapheresis procedures. Peripheral blood mononuclear cells are isolated and T cells are purified. T cells are then activated using anti-CD3/anti-CD28 antibodies (optionally antibody-coated beads), and then transduced with both vectors; the MOI of the double-guide vector is capped at 1, and optionally is or approaches 0.5. The MOI of the CAR vector is as high as 20.

[0330] The Cas9 is introduced into CAR-T cells either in the form of mRNA encoding Cas9 or in the form of ribo-nucleoprotein (RNP), where soluble Cas9 protein is complexed with a non-targeting guide RNA with no predicted target site in the genome. Whether by mRNA or RNP, the Cas9 is electroporated into the T cells 3-7 days after lentiviral transduction.

[0331] The T cells are further expanded and then selected through a series of magnetic bead processes. First, the product is negatively selected for CD3 expression by using a system such as CliniMACS that eliminates T cells. The CD3-negative fraction is then positively selected for CD34 expression using a system such as CliniMACS. The CD34+CD3− cells considered the investigational product for infusion.

[0332] Flow cytometry analysis is used to determine the number of CAR+ cells based on CD34+ cells, and the number of successfully transduced and gene edited cells based on CD3 negative and LNGFR+.

[0333] CAR T cells are administered based on dose of CAR+ cells, in the range of 10×10⁶ (a likely suboptimal dose level) to 100×10⁶ (a typical dose level) to 300×10⁶ (the typical maximum tolerated dose for CAR T cells). The library representation is measured as baseline to evaluate in-manufacturing skewing, but not be part of the dose selection per se.

### Example 4: Determining Mutant CAR-T Cell Efficacy

[0334] A sample of mutated T cells is collected from the subject via venipuncture, apheresis, or resection of tumor according to a schedule of events on a clinical protocol (typically, day 3, day 7, day 10, day 14, day 21, day 28, month 2, month 3, and month 6). T cells are isolated via standard procedures. CAR+ T cells are purified based on expression of CD34, and analyzed for expression of CD3 and other T cell markers such as CD4 and CD8. Genomic DNA is isolated from purified CAR+ T cells for downstream analysis. The sgRNA region from CAR+ T cells is amplified using PCR primers specific for sequences flanking the sgRNA cassette containing the library. PCR amplicons are then sequenced using Nextgen sequencing to quantify the abundance of each individual sgRNA in the library and the abundance for each guide in post-infusion CAR+ T cells is compared to the abundance values in the pre-infusion CAR+ T cells.

[0335] This method also allows for single-cell transcriptomic profiling of the CAR-T cells isolated from patients with capture of the sgRNA to allow for linkage of gene deletion with transcriptional phenotyping. Standard droplet-based single cell whole-transcriptome analysis platforms such as 10× Genomics is used, combined with direct capture of the sgRNA sequence from cellular RNA using a primer set specific for the sgRNA region.

### Example 5: Knockout of Multiple Genes in Primary T Cells Using Double Guide Cassette Vector

[0336] CD5 and TRAC genes were knocked in T cells out using a gRNA vector comprising two guide RNAs. Naïve T cells were activated using anti-CD3/CD28 beads (FIG. 3A). On day 1, activated T cells were transduced with the guide RNA vector which contained sgRNAs targeting CD5 and TRAC, an important component of the T cell receptor complex (TCR) (FIG. 3B). The next day, transduced cells were de-beaded (removing the anti-CD3/CD28 beads), electroporated with Cas9 and given fresh media containing IL-2 every two days. On day 10, transduced T cells were analyzed for LNGFR expression as well as TCR and CD5 knockout. (FIGS. 3C-3E). Naïve and transduced T cells were analyzed by flow cytometry after staining for cell surface expression of the TCR, CD5 and LNGFR. Results show untransduced naïve T cells maintain expression of the TCR (FIG. 1C). However, guide RNA vector transduced cells demonstrate knockout of the T cell receptor complex, resulting from expression of the TRAC targeting sgRNA and electroporation with Cas9. Two versions of the double guide cassette vector (pMGH354-CP1780) were tested (FIG. 3D). Each version contained a different sgRNA targeting CD5 (CD5 sgRNA #1 or CD5 sgRNA #2). Transduced T cells were stained for CD5 using fluorescent antibodies detecting CD5 and analyzed by flow cytometry. An isotype control, a similar fluorescent antibody which lacks specificity to CD5, was used as a negative control. Results demonstrate loss of CD5 surface expression in T cells transduced with CD5 sgRNA #2 but maintained expression of CD5 in T cells transduced with CD5 sgRNA #1. Overall, the strong CD5 knockout seen with CD5 sgRNA #2 shows appropriate function of the guide RNA vector. The maintained CD5 expression seen with CD5 sgRNA #1 suggests a poor functioning sgRNA and is not reflective of the guide RNA vector itself. Untransduced naïve T cells and gRNA vector transduced T cells were stained for expression of the LNGFR cell surface marker. Results show LNGFR expression in gRNA vector transduced T cells only (FIG. 3E).

### Example 6: Guide RNA Polynucleotide Abundance in Pooled Library Determined Via Sequencing

[0337] Naïve T cells were activated using anti-CD3/CD28 beads. On day 1, activated T cells were transduced with the double guide cassette vector (pMGH354-CP1780) which contained two sgRNAs, a drug-inducible Caspase-9 (iCasp9) safety switch and a truncated LNGFR selection marker (FIG. 4A-4B)). On day 5, transduced cells were de-beaded (removing the anti-CD3/CD28 beads), electroporated with Cas9 and replenished with fresh media containing IL-2. On day 8, pMGH354-CP1780 transduced T cells were left untreated (0 nM Rimducid), treated with vehicle only (DMSO control), or treated with varying concentrations of Rimducid which activates the iCasp9 safety switch. Each experimental condition was performed in triplicate.

[0338] Response to Rimducid was assessed by measuring a change in proportions of a guide RNA vector (CAR+ve) cells following treatment (FIG. 4C). CountBright™ absolute counting beads and a live/dead cell stain were mixed with the cell sample and assayed via flow cytometry at 24 and 48 hours after Rimducid treatment. By comparing the ratio of bead events to live cell events, absolute numbers and proportions of CAR+ve live cells in the sample was calculated. Results show maintained CAR+ve cell proportions in untreated and vehicle treated control groups. However, Rimducid treated groups demonstrate loss of CAR +ve cells over time. This shows appropriate expression and function of the iCasp9 safety switch in pMGH354-CP1780 transduced T cells.

### Example 7: CAR-T Cell CRISPR Library and Use in Humans Having Solid Tumors

[0339] Chimeric antigen receptor (CAR) T cells have transformed the treatment landscape for patients with hematologic malignancies, achieving durable complete remissions in ˜40% of patients with refractory lymphomas. However, some patients ultimately relapse, and CAR T cells have been relatively unsuccessful in patients with advanced solid tumors so far. While some of this acquired resistance is explained by the loss of the CAR target antigen, a major driver of treatment failure in both liquid and solid tumors is the inability of CAR T cells to persist and maintain sustained effector capacity in the face of persistent antigen expression, which is often referred to as “exhaustion.” This evolutionary program limits damage to the host during infection and autoimmune inflammation but creates a critical barrier to CAR T cell efficacy. In solid tumors, this program is exaggerated by the suppressive tumor microenvironment (1,2). Thus, it is critically important to define the genes and pathways that can enhance CAR T cell efficacy in both solid and liquid tumors in vivo, where the factors driving T cell dysfunction are at work.

[0340] There are various genes and pathways that could theoretically be modulated to improve CAR-T cell responses. However, there are so many candidate genes that it will essentially be impossible for the field to validate each potential candidate individually in separate Investigational New Drugs (INDs) and Phase 1 clinical trials of CAR T cells. While data from in vitro and in vivo studies provide valuable insights about the factors that govern CAR T cell functionality, parallel in vitro and in vivo genetic screens in solid and liquid cancer models show that targets identified through in vitro screens do not always correlate with in vivo screens (3,4). Some of the target genes identified as regulators of T cell function in genetic screens in vitro, such as RASA2, have not been identified as top targets in in vivo screens disclosed herein (e.g., FIG. 10B) (5). Additionally, preclinical in vivo models of CAR T cell efficacy do not always predict performance in the clinic. Therefore, a genetic screen of genes regulating CAR T cell function in human patients may be the only way to identify genes that will improve clinical performance. To fill this need, this Example implements screens of selected target genes in CAR T cells given to patients and conducts IND-enabling studies to initiate this process. The inventors believe that the use of large-scale, systematic genetic screens in cancer patients can identify regulators of CAR T cell function in solid tumors. Described herein, a limited set of loss-of-function (LOF) CRISPR screens are used to identify key modulators of T cell performance in human patients.

[0341] The therapeutic drug product has autologous T lymphocytes transduced with two lentiviral vectors—one encoding a CRISPR guide library (Mario Library) with sgRNAs targeting 135 genes related to T cell function and another encoding a chimeric antigen receptor (CAR) targeting mesothelin using the SS1 scFv binder (Meso-Mario-CART cells). The product manufacturing is designed so that each mesothelin-targeting CAR T cell expresses a single, variable sgRNA to a specific gene, and a single, fixed sgRNA to the TCR alpha chain gene (TRAC). The entire, limited-set library of knockout Meso-Mario-CAR T cells is delivered to each patient (FIG. 5). The diseases being treated are highly advanced, mesothelin-expressing cancers, including ovarian cancer and pancreatic cancer. The specific mesothelin CAR construct has previously been tested in Phase 1 clinical trials in these patient populations (SS1-BBz) both in the form of RNA-electroporated T cells and lentivirally-transduced T cells (6-12).

[0342] Mesothelin is highly expressed in ovarian cancer cells compared to normal cells, making it an attractive antigen to target with CAR T cells. Ovarian cancer is the fifth leading cause of cancer deaths in women in the United States (American Cancer Society, 2022). Ninety percent of ovarian cancers are epithelial, the most common being serous carcinoma. Most serous carcinomas are diagnosed at stage III (51%) or IV (29%), for which the 5-year cause-specific survival is 42% and 26%, respectively (13). Current treatment options combine debulking surgery, drug treatment, and radiation therapy. However, 70% of ovarian cancer patients relapse after primary cytoreductive surgery and standard first-line chemotherapy (14). The median survival in patients with platinum-resistant or refractory high-grade epithelial ovarian cancer is between 9-12 months (15). Such poor prognosis renders this indication an unmet medical need. Mesothelin is expressed in 75% of high-grade serous ovarian cancers making it a suitable target for immunotherapy (16).

[0343] Among other malignancies that highly express mesothelin is pancreatic adenocarcinoma (16). Pancreatic cancer is one of the deadliest solid tumor malignancies. The five-year survival rate is 11%, with around 50 thousand deaths expected in 2022 (17). Only 10-15% of the patients present with resectable disease at the time of diagnosis (18). For patients with locally-advanced and unresectable diseases, the treatment regimen usually consists of multiagent chemotherapy, from which 80% of the patients do not elicit a sufficient response to qualify for surgery (18). Finally, the treatment of metastatic pancreatic cancer consists of cytotoxic regimens with a median overall response between 6 to 11 months.

[0344] Previous trials of mesothelin-directed CAR T cells using the SS1-derived single-chain variable fragment as the binding domain of the CAR have demonstrated safety but an overall lack of clinically meaningful efficacy in patients with advanced ovarian or pancreatic cancer (6-12). In part, this is thought to be due to poor persistence of CAR T cells, and development of T cell dysfunction in the tumor microenvironment. There are hundreds of candidate genes and pathways that can modify T cell biology; it is not clear that it will ever be possible to conduct single first-in-human studies or randomized studies to test modifications of each of these candidate pathways in separate clinical trials or drug-development programs. When the therapeutic product is a gene-engineered cell, it is possible to use the gene-marking itself to test pools of product with different genetic modifications, and then identify the highest engrafting cell product after infusion. In this example, each patient provides information as to which gene-modified CAR T cell confers the highest benefit for that individual. It can also be possible to identify the highest-engrafting and/or most persistent CAR T products across patients and across two diseases that express the same target antigen (in this case, mesothelin).

[0345] A CRISPR screen is based on using a lentiviral library of guide RNAs combined with transient expression of Cas9 nuclease to generate a pool of cells that each have a single gene from the library knocked out. Thus, a CRISPR screen in human patients can be used to rapidly identify which gene knockouts from a selected and curated library of genes that are involved in modifying T cell biology, results in increased engraftment, persistence and responses in patients with advanced solid tumors that express mesothelin. The inventors believe that Meso-Mario CAR T cells offer the chance of prospective benefit to individual patients because the therapeutic product takes “multiple shots on goal,” generating CAR T cells that may have improved effector function and yet have a defined specificity (based on the SS1-BBz CAR construct) that has previously been shown to be safe (6,7). Beyond the prospective benefit for each individual human research subject on this study, using this approach, a single gene knockout may be rapidly identified that confers greater engraftment, persistence, and response across patients or across two diseases; if this is the case, then a more typical drug development pathway onward, incorporating that specific, single-gene-knockout in the context of Meso-CAR-T, can be undertaken separately, to maximize benefit for the greatest number of patients.

### Product Description and Design

[0346] The therapeutic drug product is autologous T lymphocytes transduced with two lentiviral vectors—one encoding a CRISPR sgRNA library (Mario library) targeting 135 genes related to T cell function (Table 1) as well as the TCR alpha chain (TRAC) to remove the endogenous TCR, and another lentiviral vector encoding a chimeric antigen receptor (CAR) targeting mesothelin (Meso-Mario-CART cells).

ADORA2A
AGO1
AGPS
ARID1A
ARID2
ARIH2
ATF6
BATF3
BCL6
BTLA
CABP4
CBLB
CD160
CD2
CD244
CD5
CD69
CDKN1B
CPT1B
CRELD1
CTBS
CTLA4
CXCR3
CYB5R4
DGKA
DGKZ
DLAT
DNMT1
DNMT3A
DNMT3B
DUSP4
EED
ELOB
ENTPD1
EOMES
EPAS1
ERG
ETS1
EZH2
FIBP
FLI1
FLT1
FOXP3
FUBP1
GATA3
GGH
GLRX
GNA13
HAVCR2
HIF1A
ID2
IFNAR1
IFNAR2
IFNG
IFNGR1
IFNGR2
IKZF1
IKZF2
IL10RA
IL10RB
IL13
IL18R1
IL1A
IL2RA
IREB2
IRF2
IRF4
ITK
JUNB
KDM1A
KDR
KLRB1
KLRC1
KLRD1
LAG3
LCP2
LEF1
LTA
MEF2D
MOCS3
NDUFB10
NFATC1
NFATC2
NR4A1
NR4A2
NR4A3
NT5E
PBRM1
PCBP2
PDCD1
PDCL
PDHA1
PDHB
PEX13
PRDM1
PRDM15
PTPN2
RARA
RARB
RARG
RASA2
RC3H1
RCOR1
RNF145
RPRD1B
RUNX1
RUNX3
SETDB1
SFRP1
SMAD2
SMARCA4
SMARCB1
SOCS1
STAT3
STAT6
TASOR
TBL1XR1
TCF7
TET2
TGFBR1
TGFBR2
TIGIT
TMEM222
TNFAIP3
TNFAIP8
TNFRSF18
TNFRSF9
TNIP1
TOX
UBASH3A
VAV1
VHL
VTI1A
ZC3H12A
ZFP36L1
Intergenic controls (N = 100)

### Example 6 Table 1: Genes Included in the sgRNA Library (Mario Library) of the Meso-Mario-CART Cell Product

Design of the CRISPR sgRNA Library

[0347] The CRISPR library was designed to maximize safety, prospect of benefit, and learnings to the field by optimal deconvolution of data obtained from each treated subject. 135 genes were selected based on a literature search and genes that were tested (i.e., IFNG, ITK, PDCD1, HAVCR2) (FIG. 6). The dominant transcripts for each gene were then chosen, and 34,318 guides were designed using CRISPick (30). To minimize potential off-target effects of sgRNA guides, guides with predicted off-target cuts in tumor suppressor genes were then removed (31). Guide RNAs targeting regions with high variability in the human population were removed. The Cutting Frequency Determination (CFD) score was used to mitigate the risk of off-target activity of any given guide (30). Guides with aggregated CFD off-target scores ≤0.27 were removed. For each gene, the Rule Set 3 score was used, which incorporates multiple sequence features that contribute to the sgRNA expression and generation of on-target gene editing to choose 8 sgRNAs per gene (32). Finally, 100 validated intergenic control guides were included for a total of 1180 guides in the library. When combined with Cas9 protein (which will be delivered in the form of mRNA via electroporation), each cell transduced with the Mario library is expected to have two genes knocked out: the TCR alpha chain, and a single gene from the library.

### Design of Lentiviral Vectors

[0348] Two lentiviral vector constructs were designed for safe delivery of the CRISPR sgRNA library (pMario) and a chimeric antigen receptor targeting mesothelin (pCAR, FIG. 7A). For the construct containing the CRISPR library (pMario), another layer of safety was added by incorporating an inducible caspase 9 (iCasp9)-based safety switch that could eliminate CAR T cells in case of severe adverse events or outgrowth of a CAR T cell clone. To optimize expression of two sgRNAs, a dual sgRNA cassette was designed where the sgRNA library was cloned into position 1, and position 2 contains an sgRNA to the T cell receptor alpha constant gene (TRAC). Because assembly of the natural T cell receptor/CD3 complex requires an intact TCR alpha chain, knockout of TRAC results in loss of expression of the entire native TCR/CD3 complex. Thus, the TRAC-targeting guide allows for the negative selection of edited cells during manufacturing (using CliniMACs to perform CD3-based magnetic selection of the investigational product). Clinically, this selection for CD3-negative T cells also minimizes the risk of potentiating a self-reactive T cell (based on a retained TCR of undefined specificity). Finally, a truncated low-affinity nerve growth factor receptor ((LNGFR) reporter was included to allow for flow-cytometry-based enumeration, recovery, and enrichment of the cells after infusion, and facilitates further analysis of the enriched and depleted sgRNAs. The pCAR vector (FIG. 7A) was designed to contain a CAR construct consisting of the SS1 scFv that binds mesothelin and a 4-1BB intracellular co-stimulatory domain (6-11). The construct also contains a CD34t reporter to allow for dosing of CAR+ T cells and post-infusion monitoring.

Validation of the sgRNA Double Cassette and the Reporter System

[0349] To determine the reporter expression and editing efficiency of the dual sgRNA cassette, bead-activated T cells (CD3/CD28 beads at 3:1 beads:T cell ratio) were transduced with a double guide vector that encoded sgRNAs targeting CD5 and TRAC. After de-beading, the cells were electroporated with Cas9 mRNA. Naïve and transduced T cells were then analyzed by flow cytometry for cell surface expression of tLNGFR, CD3, and CD5 (FIG. 7B-7D). Isotype controls, which are similar fluorescent antibody that lacks specificity to the analyzed target, were used as a negative control. Results show that LNGFR was expressed in the double guide vector transduced T cells (FIG. 7B). Untransduced, naïve T cells maintain expression of the TCR (CD3); however, double guide vector transduced cells lack CD3 expression, resulting from successful targeting of TRAC with the sgRNA following Cas9 electroporation (FIG. 7C). LNFGR+ cells also lack CD5 expression, demonstrating the appropriate function of the double guide cassette vector.

### Generation of Meso-Mario-CART Cell for In Vivo Testing

[0350] A protocol for production of Meso-Mario-CART cells for in vivo testing was determined. On day 0, T cells were activated using CD3/CD28 beads. The cells were then transduced with lentivirus harboring the anti-mesothelin CAR. On day 2, the cells were transduced with the lentiviral vector containing the CRISPR (Mario) library. The cells were then transfected with Cas9 mRNA via electroporation on day 5. The cells were expanded to day 10, and CD3-negative cells were enriched by depleting CD3-positive cells using an APC-CD3 selection kit. After two rounds of selection, the protocol was able to generate final products with up to 88% double transduced cells (mCherry+CD3−) (FIGS. 8A-8C).

### In Vivo Pilot Study of the CRISPR Screen

[0351] In preparation for human CRISPR screens, pilot CRISPR screens in vivo in NSG mice were performed (FIG. 9). The described Mario sgRNA library targeting the selected 135 relevant T cell regulators was generated, with 8 sgRNAs per gene. T cells were transduced with this library and mesothelin CAR, and electroporated T cells with Cas9 mRNA as described. The library-transduced T cells were transferred into mesothelin+ ASPC1 tumor-bearing mice. After 14 days the CAR T cells were isolated from the tumor after digestion and positive selection for human CD45. Data were generated by PCR amplification of sgRNAs from gDNA of isolated T cells, followed by next-generation sequencing (NGS).

[0352] The recovered CAR T cells from the tumors and spleens of ASPC1 tumor-bearing mice demonstrate that an ability to engraft a high number of tumor-infiltrating mesothelin CAR T cells and efficiently capture the T cells from the tumor and spleen, allowing for a technically robust in vivo screening experiment even in small numbers of animals (FIG. 10A). The distribution of the sgRNAs in the recovered CAR T cells indicates that we can capture the full CRISPR library, and the guides are well represented in the recovered pools of cells.

[0353] These results identified that the top hits during an in vivo screen, were in fact the opposite of what the top predicted hits from a published whole-genome CRISPR screen that was conducted in vitro (5). In these results, knockout of IL2RA was enriched in vivo, whereas knockout of RASA2 was depleted (FIG. 10B). In previous in vitro screens RASA2 was among the most enriched gene knockouts in T cells. Furthermore, these data illustrate that using in vitro models to predict the best genetic knockout targets to enhance CAR T cell function may not in fact predict in vivo function or activity. Similar results were observed using a BCMA CAR indicating that the effects of the gene knockouts are not CAR-specific (see Example 8).

Production of Large-Scale sgRNA Plasmid Library

[0354] Based on our pre-clinical data results, the feasibility of producing the plasmid library (Mario library) at a large scale and with investigational new drug (IND)-Ready methodology with sufficient quality to enable current good manufacturing practice (cGMP)-grade lentiviral vector manufacturing was assessed. To assess the quality of the large-scale guide library, the guide distribution of the original plasmid library stock was compared to the large-scale IND-Ready plasmid preparation. In the large scale preparation, the guide abundance in the plasmids was first analyzed using NGS of PCR products flanking the guide region. Then the primary human T cells were transduced with lentivirus prepared side-by-side using either the original plasmid primary library stock or the large-scale plasmid preparation.

[0355] Results indicate that the large-scale plasmid preparation process did not significantly alter the distribution of plasmids in the library (FIG. 11A). Furthermore, the distribution of guides in the transduced T cells was not significantly altered (FIG. 11B), indicating that the plasmid preparation can be used to make lentivirus and cell products suitable for clinical-grade screening studies. FIG. 12 outlines a cGMP-compliant manufacturing process for the Meso-Mario-CAR T cell product (FIG. 12).

### Treatment Plan

[0356] Human patients may undergo 3 days of lymphodepletion chemotherapy starting about 5 days before the infusion of Meso-Mario-CART cells on Day 0 (FIG. 13). Lymphodepletion can be given outpatient or inpatient, per the medical provider's judgment. Following CAR T cell infusion, patients are monitored for adverse events, clinical status, and laboratory parameters. Research samples are collected for correlative studies at the time points indicated (FIG. 13 and FIG. 14) for up to 24 months. Research samples are analyzed using the methods described herein (e.g., in Examples 4-6).

### REFERENCES

[0357] 1. Larson R C, Kann M C, Bailey S R, Haradhvala N J, Llopis P M, Bouffard A A, et al. CAR T cell killing requires the IFNγR pathway in solid but not liquid tumours. Nature [Internet]. 2022 Apr. 21 [cited 2023 Mar. 2]; 604 (7906):563-70. Available from: https://www.nature.com/articles/s41586-022-04585-5
[0358] 2. Bailey S R, Vatsa S, Larson R C, Bouffard A A, Scarfò I, Kann M C, et al. Blockade or Deletion of IFNγ Reduces Macrophage Activation without Compromising CAR T cell Function in Hematologic Malignancies. Blood Cancer Discov [Internet]. 2022 Mar. 1 [cited 2023 Mar. 2]; 3 (2):136-53. Available from: https://aacrjournals.org/bloodcancerdiscov/article/3/2/136/681793/Blockade-or-Deletion-of-IFN-Reduces-Macrophage
[0359] 3. Lin S, Larrue C, Scheidegger N K, Seong B K A, Dharia N V, Kuljanin M, et al. An In Vivo CRISPR Screening Platform for Prioritizing Therapeutic Targets in AML. Cancer Discov [Internet]. 2022 Feb. 1 [cited 2023 Mar. 2]; 12 (2):432-49. Available from: https://aacrjournals.org/cancerdiscovery/article/12/2/432/678482/An-In-Vivo-CRISPR-Screening-Platform-for
[0360] 4. Michels B E, Mosa M H, Streibl B I, Zhan T, Menche C, Abou-El-Ardat K, et al. Pooled In Vitro and In Vivo CRISPR-Cas9 Screening Identifies Tumor Suppressors in Human Colon Organoids. Cell Stem Cell [Internet]. 2020 May [cited 2023 Mar. 2]; 26 (5):782-792.e7. Available from: https://linkinghub.elsevier.com/retrieve/pii/S1934590920301429
[0361] 5. Carnevale J, Shifrut E, Kale N, Nyberg W A, Blaeschke F, Chen Y Y, et al. RASA2 ablation in T cells boosts antigen sensitivity and long-term function. Nature [Internet]. 2022 Sep. 1 [cited 2023 Mar. 2]; 609 (7925):174-82. Available from: https://www.nature.com/articles/s41586-022-05126-w
[0362] 6. Haas A R, Tanyi J L, O'Hara M H, Gladney W L, Lacey S F, Torigian D A, et al. Phase I Study of Lentiviral-Transduced Chimeric Antigen Receptor-Modified T Cells Recognizing Mesothelin in Advanced Solid Cancers. Mol Ther [Internet]. 2019 November [cited 2023 Mar. 15]; 27 (11):1919-29. Available from: https://linkinghub.elsevier.com/retrieve/pii/S1525001619303284
[0363] 7. Beatty G L, O'Hara M H, Lacey S F, Torigian D A, Nazimuddin F, Chen F, et al. Activity of Mesothelin-Specific Chimeric Antigen Receptor T Cells Against Pancreatic Carcinoma Metastases in a Phase 1 Trial. Gastroenterology [Internet]. 2018 July [cited 2023 Mar. 15]; 155 (1):29-32. Available from: https://linkinghub.elsevier.com/retrieve/pii/S0016508518303238
[0364] 8. Tanyi J L, Stashwick C, Plesa G, Morgan M A, Porter D, Maus M V, et al. Possible Compartmental Cytokine Release Syndrome in a Patient With Recurrent Ovarian Cancer After Treatment With Mesothelin-targeted CAR-T Cells. J Immunother [Internet]. 2017 April [cited 2023 Apr. 3]; 40 (3):104-7. Available from: https://journals.lww.com/00002371-201704000-00003
[0365] 9. Ko A H, Jordan A C, Tooker E, Lacey S F, Chang R B, Li Y, et al. Dual Targeting of Mesothelin and CD19 with Chimeric Antigen Receptor-Modified T Cells in Patients with Metastatic Pancreatic Cancer. Mol Ther [Internet]. 2020 November [cited 2023 Apr. 3]; 28 (11):2367-78. Available from: https://linkinghub.elsevier.com/retrieve/pii/S1525001620303683
[0366] 10. Maus M V, Haas A R, Beatty G L, Albelda S M, Levine B L, Liu X, et al. T Cells Expressing Chimeric Antigen Receptors Can Cause Anaphylaxis in Humans. Cancer Immunol Res [Internet]. 2013 Jul. 1 [cited 2023 Apr. 3]; 1 (1):26-31. Available from: https://aacrjournals.org/cancerimmunolres/article/1/1/26/466725/T-Cells-Expressing-Chimeric-Antigen-Receptors-Can
[0367] 11. Beatty G L, Haas A R, Maus M V, Torigian D A, Soulen M C, Plesa G, et al. Mesothelin-Specific Chimeric Antigen Receptor mRNA-Engineered T Cells Induce Antitumor Activity in Solid Malignancies. Cancer Immunol Res [Internet]. 2014 Feb. 1 [cited 2023 Apr. 3]; 2 (2):112-20. Available from: https://aacrjournals.org/cancerimmunolres/article/2/2/112/467025/Mesothelin-Specific-Chimeric-Antigen-Receptor-mRNA
[0368] 12. Adusumilli P S, Zauderer M G, Rivière I, Solomon S B, Rusch V W, O'Cearbhaill R E, et al. A Phase I Trial of Regional Mesothelin-Targeted CAR T-cell Therapy in Patients with Malignant Pleural Disease, in Combination with the Anti-PD-1 Agent Pembrolizumab. Cancer Discov [Internet]. 2021 Nov. 1 [cited 2023 Apr. 4]; 11 (11):2748-63. Available from: https://aacrjournals.org/cancerdiscovery/article/11/11/2748/666400/A-Phase-I-Trial-of-Regional-Mesothelin-Targeted
[0369] 13. Torre L A, Trabert B, DeSantis C E, Miller K D, Samimi G, Runowicz C D, et al. Ovarian cancer statistics, 2018: Ovarian Cancer Statistics, 2018. CA Cancer J Clin [Internet]. 2018 July [cited 2023 Mar. 2]; 68 (4):284-96. Available from: http://doi.wiley.com/10.3322/caac.21456
[0370] 14. Giornelli G H. Management of relapsed ovarian cancer: a review. SpringerPlus [Internet]. 2016 December [cited 2023 Mar. 2]; 5 (1):1197. Available from: http://springerplus.springeropen.com/articles/10.1186/s40064-016-2660-0
[0371] 15. Davis A, Tinker A V, Friedlander M. “Platinum resistant” ovarian cancer: What is it, who to treat and how to measure benefit? Gynecol Oncol [Internet]. 2014 June [cited 2023 Mar. 2]; 133 (3):624-31. Available from: https://linkinghub.elsevier.com/retrieve/pii/S0090825814002029
[0372] 16. Hassan R, Thomas A, Alewine C, Le D T, Jaffee E M, Pastan I. Mesothelin Immunotherapy for Cancer: Ready for Prime Time? J Clin Oncol [Internet]. 2016 Dec. 1 [cited 2023 Mar. 2]; 34 (34):4171-9. Available from: https://ascopubs.org/doi/10.1200/JCO.2016.68.3672
[0373] 17. Jiang Y, Sohal D P S. Pancreatic Adenocarcinoma Management. JCO Oncol Pract [Internet]. 2023 January [cited 2023 Mar. 2]; 19 (1):19-32. Available from: https://ascopubs.org/doi/10.1200/OP.22.00328
[0374] 18. Park W, Chawla A, O'Reilly E M. Pancreatic Cancer: A Review. JAMA [Internet]. 2021 Sep. 7 [cited 2023 Mar. 2]; 326 (9):851. Available from: https://jamanetwork.com/journals/jama/fullarticle/2783817
[0375] 30. Doench J G, Fusi N, Sullender M, Hegde M, Vaimberg E W, Donovan K F, et al. Optimized sgRNA design to maximize activity and minimize off-target effects of CRISPR-Cas9. Nat Biotechnol [Internet]. 2016 February [cited 2023 Mar. 2]; 34 (2):184-91. Available from: http://www.nature.com/articles/nbt.3437
[0376] 31. Lenoir W F, Morgado M, DeWeirdt P C, Mclaughlin M, Griffith A L, Sangree A K, et al. Discovery of putative tumor suppressors from CRISPR screens reveals rewired lipid metabolism in acute myeloid leukemia cells. Nat Commun [Internet]. 2021 Nov. 11 [cited 2023 Mar. 2]; 12 (1):6506. Available from: https://www.nature.com/articles/s41467-021-26867-8
[0377] 32. DeWeirdt P C, McGee A V, Zheng F, Nwolah I, Hegde M, Doench J G. Accounting for small variations in the tracrRNA sequence improves sgRNA activity predictions for CRISPR screening. Nat Commun [Internet]. 2022 Sep. 6 [cited 2023 Mar. 2]; 13 (1):5255. Available from: https://www.nature.com/articles/s41467-022-33024-2

### Example 8: CAR-T Cell CRISPR Library in Liquid Tumors

[0378] CAR-T cell therapies have proven effective in treating some hematologic cancers. However, challenges still remain in treating hematological cancers like multiple myeloma. For example, BCMA CAR-T cells have shown a initial response against multiple myeloma, but most patients eventually relapse. Thus, there is a need for improving CAR-T cell therapy for treating multiple myeloma. To address this, the Mario CRISPR library described in Example 7 (also referred to as +CP1789 library) was applied to BCMA CAR-T cells to produce a BCMA CAR-T cell+Mario library (see FIG. 15 for construct illustrations). Each of the genes selected for targeting in the Mario library were related to CAR-T cell function and thus expected to influence CAR-T cell function. The BCMA CAR-T cell+Mario library was administered to mice having a human multiple myeloma cancer (FIG. 17, top panel). Results show that the BCMA CAR-T cell+Mario library was capable of killing cancer cells (FIG. 17, bottom panel).

[0379] To measure individual BCMA CAR-T Cell CRISPR targeting effects in vivo, CAR-T cells were sampled from the library and gRNA polynucleotide were sequenced, which is indicative of the relative abundance of a CAR-T cell comprising a knockout mutation of the gene targeted by the gRNA polynucleotide. This sequencing data was analyzed to determine which gene knockouts increased or decreased CAR-T relative abundance over a given time. Initial experiments administered the BCMA CAR-T cell+Mario library at day 0 (21 days after cancer cell administration) and collected a sample of the BCMA CAR-T cell+Mario library from the mouse at day 7 for sequencing (FIG. 18). Results identified genes knockouts that enriched CAR-T cells abundance in vivo (e.g., IL2RA) and gene knockouts that decreased CAR-T cell abundance in vivo (e.g., RASA2) (FIGS. 19A-19B). Surprisingly, RASA2 had previously been shown to be highly enriched in vitro CAR-T cell knockout screens. Additionally, a similar results were seen for mesothelin CAR treating pancreatic cancer.

[0380] Additional experiments were performed using different T cell donors (but the same BCMA CAR and Mario library) and for different time periods to determine reproducibility and to estimate how long the BCMA CAR-T cell+Mario library should be in the subject before collecting the BCMA CAR-T cell+Mario library and sequencing (FIGS. 20A-20F)). Results indicate that administering the BCMA CAR-T cell+Mario library at day 0 (21 days after giving cancer cells to the mice) and collecting the BCMA CAR-T cell+Mario library from the subject at day 7 or day 21 results in higher resolution of CAR-T cell knockout effect than administering the BCMA CAR-T cell+Mario library at day-11 (10 days after giving cancer cells to the mice) and collecting the BCMA CAR-T cell+Mario library from the subject at day 7 (FIGS. 20C, 20D, and 20F). Additionally, results were reproducible between experimental replicates, ND99 and ND106, which demonstrates the reproducibility of the assay. Further, IL2RA was identified as the most enriched CAR-T cell gene knockout between replicates and over different CAR-T collection times as shown FIGS. 18, 20C and 20D.

### Example 9. Current Good Manufacturing Practice (cGMP)-Grade CRISPR Plasmid Library Preparation

[0381] Regulatory agencies, like the Food and Drug Administration, require cGMP compliance in producing the vectors that go into CAR-T cells for clinical use in to humans (e.g., 21 C.F.R. §§ 210, 211). However, current accepted protocols for producing cGMP compliant vectors are not applicable to producing the gRNA vector libraries (e.g., the Mario library) as described herein. Standard protocols were not applicable because these protocols are designed for production of a single plasmid (to be used in a vector), not a library of plasmids. Particularly, in cGMP standard protocols, a plasmid is transformed into chemically competent E. Coli, plated on agar plates with antibiotics, a single colony is selected from the agar plate, the colony is sequenced for quality control, and then produced at large scale. However, cGMP production of gRNA vector libraries selection of many colonies (thousands to millions) to produce a high quality gRNA vector library. Thus a new cGMP production protocol needed to be developed that maintained cGMP quality standards and the maintain the diversity of the gRNA vector library.

[0382] The central challenge in developing this protocol was producing a gRNA vector library of sufficient quality and diversity (e.g., coverage) of the pool of guide RNAs. To maintain library diversity, the gRNA vector library (e.g., the Mario library) was transformed into electro-competent E. coli, plated on an agar plate with antibiotics, the plate is scraped to remove the colonies that grew on the plate, then a glycerol stock is made, which was sent to a contract research organization (CRO) that specializes in investigation new drug cGMP production. The CRO proceed with cGMP production using the glycerol stock, however, the plasmid yield and quality was surprisingly low (data not shown). Similar results were observed by the inventors (FIG. 21A). Particularly, the same amount of DNA was loaded into lanes 1-7, but DNA from overnight growth of the glycerol stock showed greatly decreased yields compared to the original glycerol stock, which is evidence of low quality DNA. After attempting many different methods for solving this problem, it was discovered that increasing selection (e.g., selection for E. coli having a gRNA plasmid) by increasing the antibiotic concentration by 2-4 fold greatly improved Mario library yield and quality (FIGS. 21B-21C). Specifically, increasing Carbenicillin from 100 μg/mL to 200 μg/mL in cultures grown E. coli transformed with Mario library improved quality and yield. This protocol was then used to produce cGMP vector with the CRO, which maintained library diversity and quality (FIG. 11B).

[0383] In summary, a key to maintaining the diversity and equal distribution of plasmids in the library is the high-efficiency electrocompetent bacterial transformation of starting material and scraping of glycerol stocks which each maintain >1000 copies of each plasmid. The non-standard increased antibiotic concentration (200 ug/mL Carbenicillin) greatly improved plasmid yields and quality. Overall, this show that a cGMP, IND-ready gRNA vector library can be produced.

### Additional Sequence Tables

[0384] The following tables list sequences of exemplary genes selected for mutation in immune cells (e.g., CAR-T cells, e.g., CAR-NK cells) (Table 2), exemplary guide RNA homology regions for targeting said exemplary genes (Table 4), and exemplary CAR vector and gRNA vectors (Table 5), and exemplary CAR sequences (Table 6).

Lengthy table referenced here
US20260176622A1-20260625-T00001
Please refer to the end of the specification for access instructions.

Lengthy table referenced here
US20260176622A1-20260625-T00002
Please refer to the end of the specification for access instructions.

Lengthy table referenced here
US20260176622A1-20260625-T00003
Please refer to the end of the specification for access instructions.

Lengthy table referenced here
US20260176622A1-20260625-T00004
Please refer to the end of the specification for access instructions.

Lengthy table referenced here
US20260176622A1-20260625-T00005
Please refer to the end of the specification for access instructions.

LENGTHY TABLES
The patent application contains a lengthy table section. A copy of the table is available in electronic form from the USPTO web site (https://seqdata.uspto.gov/docdetail?docId=US20260176622A1). An electronic copy of the table will also be available from the USPTO upon request and payment of the fee set forth in 37 CFR 1.19(b)(3).

1. A composition comprising a plurality of guide RNA (gRNA) polynucleotides, wherein at least 2 gRNA polynucleotides each comprise a homology region that is complementary to a sense strand or an antisense strand of a different gene encoded by a sequence of any one of SEQ ID NOs: 1-135 or a variant thereof.

2.-13. (canceled)

14. The composition of claim 1, comprising at least 8 gRNA polynucleotides per gene sequence, wherein the at least 8 gRNA polynucleotides per gene sequence comprises different sequences.

15. The composition of claim 14, wherein the or at least 8 gRNA polynucleotides per gene sequence are complementary to non-overlapping regions of the same gene sequence.

16.-19. (canceled)

20. The composition of claim 1, the composition comprising at least one gRNA polynucleotide comprising a sequence of any one of SEQ ID NOS: 136-1315.

21. The composition of claim 1, the composition comprising at least 10 gRNA polynucleotides each comprising a different sequence of any one of SEQ ID NOs: 136-1315.

22.-23. (canceled)

24. A composition, comprising a plurality of gRNA polynucleotides comprising the sequences of SEQ ID NOs: 136-1315.

25.-30. (canceled)

31. The composition of claim 1, wherein the plurality of guide RNA polynucleotides consists of at most 5,000 gRNA polynucleotides having different sequences.

32.-54. (canceled)

55. The composition of claim 1, wherein at least 1 gRNA polynucleotide comprises a homology region that is complementary to a sense strand or an antisense strand of a different gene encoded by any one of IL2RA (SEQ ID NO: 65) or a variant thereof, GATA3 (SEQ ID NO: 46) or a variant thereof, AGPS (SEQ ID NO: 3) or a variant thereof, PTPN2 (SEQ ID NO: 98) or a variant thereof, LAG3 (SEQ ID NO: 76) or a variant thereof, PDCD1 (SEQ ID NO: 91) or a variant thereof, TGFBR2 (SEQ ID NO: 121) or a variant thereof, RARA (SEQ ID NO: 99) or a variant thereof, SmarcB1 (SEQ ID NO: 113) or a variant thereof, CDKN1B (SEQ ID NO: 18) or a variant thereof, RunX (SEQ ID NO: 107) or a variant thereof, and TCF7 (SEQ ID NO: 118) or a variant thereof.

56.-59. (canceled)

60. The composition of claim 1, comprising:
a first gRNA polynucleotide comprising a homology region that is complementary to a sense strand or an antisense strand of a gene encoded by IL2RA (SEQ ID NO: 65) or a variant thereof;
a second gRNA polynucleotide comprising a homology region that is complementary to a sense strand or an antisense strand of a gene encoded by GATA3 (SEQ ID NO: 46) or a variant thereof; a third gRNA polynucleotide comprising a homology region that is complementary to a sense strand or an antisense strand of a gene encoded by AGPS (SEQ ID NO: 3) or a variant thereof;
a fourth gRNA polynucleotide comprising a homology region that is complementary to a sense strand or an antisense strand of a gene encoded by PTPN2 (SEQ ID NO: 98) or a variant thereof;
a fifth gRNA polynucleotide comprising a homology region that is complementary to a sense strand or an antisense strand of a gene encoded by LAG3 (SEQ ID NO: 76) or a variant thereof;
a sixth gRNA polynucleotide comprising a homology region that is complementary to a sense strand or an antisense strand of a gene encoded by PDCD1 (SEQ ID NO: 91) or a variant thereof;
a seventh gRNA polynucleotide comprising a homology region that is complementary to a sense strand or an antisense strand of a gene encoded by TGFBR2 (SEQ ID NO: 121) or a variant thereof;
a eighth gRNA polynucleotide comprising a homology region that is complementary to a sense strand or an antisense strand of a gene encoded by RARA (SEQ ID NO: 99) or a variant thereof;
a nineth gRNA polynucleotide comprising a homology region that is complementary to a sense strand or an antisense strand of a gene encoded by SmarcB1 (SEQ ID NO: 113) or a variant thereof;
a tenth gRNA polynucleotide comprising a homology region that is complementary to a sense strand or an antisense strand of a gene encoded by CDKN1B (SEQ ID NO: 18) or a variant thereof or a variant thereof;
a eleventh gRNA polynucleotide comprising a homology region that is complementary to a sense strand or an antisense strand of a gene encoded by RunX (SEQ ID NO: 107) or a variant thereof;
and/or
a twelve gRNA polynucleotide comprising a homology region that is complementary to a sense strand or an antisense strand of a gene encoded by TCF7 (SEQ ID NO: 118) or a variant thereof.

61.-73. (canceled)

74. A guide RNA polynucleotide comprising a sequence of any one of SEQ ID NOs: 136-1315.

75. A plurality of plasmids comprising one or more of the gRNA polynucleotides of the composition of claim 1.

76.-121. (canceled)

122. A CAR vector comprising the sequence of SEQ ID NO: 1319.

123. A composition comprising any one of the gRNA polynucleotides of the composition of claim 1 and a CAR vector comprising the sequence of SEQ ID NO: 1319.

124. A plurality of CAR-T cells, wherein at least two CAR-T cells each comprise a gRNA polynucleotide comprising a homology region that is complementary to a strand or an antisense strand of a different gene encoded by a sequence of any one of SEQ ID NOs: 1-135 or a variant thereof.

125.-154. (canceled)

155. A method of producing a mutant CAR-T cell library comprising:
(a) activating T cells,
(b) transfecting the T cells with the gRNA polynucleotides of claim 24,
(c) transfecting the T cells with CAR vector comprising the sequence of SEQ ID NO: 1319, and
(d) introducing a CRISPR protein encoding mRNA or a CRISPR protein into the T cell.

156.-173. (canceled)

174. A method of identifying a gRNA polynucleotide associated with CAR-T cell efficacy in vivo comprising:
(a) administering to a subject the plurality of CAR-T cells of claim 124,
(b) collecting one or more samples comprising CAR-T cells of the plurality of CAR-T cells from the subject,
(c) sequencing gRNA polynucleotides from the mutant CAR-T cells collected in (b), and
(d) evaluating the change in relative abundance of each gRNA polynucleotide based on the sequencing in (c).

175.-205. (canceled)

206. A plurality of CAR natural killer (CAR-NK) cells, wherein at least two CAR-NK cells comprise a gRNA polynucleotide comprising a homology region that is complementary to a sense strand or an antisense strand of a different gene encoded by a sequence of any one of SEQ ID NOs: 1-135 or a variant thereof.

207.-230. (canceled)

231. A method of producing a mutant CAR-NK cell library comprising:
(a) activating CAR-NK cells,
(b) transducing the CAR-NK cells with the gRNA polynucleotides of claim 24,
(c) transducing the CAR-NK cells with a CAR vector comprising the sequence of SEQ ID NO: 1319, and
(d) introducing a CRISPR protein encoding mRNA or a CRISPR protein into the NK cell.

232.-279. (canceled)

280. A method comprising administering a mutant CAR-T cell library to a human subject, wherein the mutant CAR-T cell library comprises at least 2 CAR-T cells that each comprise a different gRNA polynucleotide comprising a homology region that is complementary to a different gene sequence of any one of SEQ ID NOs: 1-135 or a variant thereof.

The application's sequence listing, which the Patent Office published only in electronic form, follows.

SEQUENCE LISTING (1390 sequences)

SEQ ID NO: 1 - DNA, 2412 bp, Homo sapiens
  source 1..2412: mol_type = genomic DNA
gactcccaggcccgaggactcctggaagggaggtgcctcaggaaccctgaagctgggctgagccatgatgctgctgccagaacccctgcagagggcctggtttcaggagactcagagtcctctgtgaaaaagcccttggagagcgccccagcagggctgcacttggctcctgtgaggaaggggctcaggggtctgggcccctccgcctgggccgggctgggagccaggcgggcggctgggctgcagcaatggaccgtgagctggcccagcccgcgtccgtgctgagcctgcctgtcgtctgtggccatgcccatcatgggctcctcggtgtacatcacggtggagctggccattgctgtgctggccatcctgggcaatgtgctggtgtgctgggccgtgtggctcaacagcaacctgcagaacgtcaccaactactttgtggtgtcactggcggcggccgacatcgcagtgggtgtgctcgccatcccctttgccatcaccatcagcaccgggttctgcgctgcctgccacggctgcctcttcattgcctgcttcgtcctggtcctcacgcagagctccatcttcagtctcctggccatcgccattgaccgctacattgccatccgcatcccgctccggtacaatggcttggtgaccggcacgagggctaagggcatcattgccatctgctgggtgctgtcgtttgccatcggcctgactcccatgctaggttggaacaactgcggtcagccaaaggagggcaagaaccactcccagggctgcggggagggccaagtggcctgtctctttgaggatgtggtccccatgaactacatggtgtacttcaacttctttgcctgtgtgctggtgcccctgctgctcatgctgggtgtctatttgcggatcttcctggcggcgcgacgacagctgaagcagatggagagccagcctctgccgggggagcgggcacggtccacactgcagaaggaggtccatgctgccaagtcactggccatcattgtggggctctttgccctctgctggctgcccctacacatcatcaactgcttcactttcttctgccccgactgcagccacgcccctctctggctcatgtacctggccatcgtcctctcccacaccaattcggttgtgaatcccttcatctacgcctaccgtatccgcgagttccgccagaccttccgcaagatcattcgcagccacgtcctgaggcagcaagaacctttcaaggcagctggcaccagtgcccgggtcttggcagctcatggcagtgacggagagcaggtcagcctccgtctcaacggccacccgccaggagtgtgggccaacggcagtgctccccaccctgagcggaggcccaatggctatgccctggggctggtgagtggagggagtgcccaagagtcccaggggaacacgggcctcccagacgtggagctccttagccatgagctcaagggagtgtgcccagagccccctggcctagatgaccccctggcccaggatggagcaggagtgtcctgatgattcatggagtttgccccttcctaagggaaggagatctttatctttctggttggcttgaccagtcacgttgggagaagagagagagtgccaggagaccctgagggcagccggttcctactttggactgagagaagggagccccaggctggagcagcatgaggcccagcaagaagggcttgggttctgaggaagcagatgtttcatgctgtgaggccttgcaccaggtgggggccacagcaccagcagcatctttgctgggcagggcccagccctccactgcagaagcatctggaagcaccaccttgtctccacagagcagcttgggcacagcagactggcctggccctgagactggggagtggctccaacagcctcctgccacccacacaccactctccctagactctcctagggttcaggagctgctgggcccagaggtgacatttgacttttttccaggaaaaatgtaagtgtgaggaaaccctttttattttattacctttcactctctggctgctgggtctgccgtcggtcctgctgctaacctggcaccagagcctctgcccggggagcctcaggcagtcctctcctgctgtcacagctgccatccacttctcagtcccagggccatctcttggagtgacaaagctgggatcaaggacagggagttgtaacagagcagtgccagagcatgggcccaggtcccaggggagaggttggggctggcaggccactggcatgtgctgagtagcgcagagctacccagtgagaggccttgtctaactgcctttccttctaaagggaatgtttttttctgagataaaataaaaacgagccacatcgtgttttaagcttgtccaaatg

SEQ ID NO: 2 - DNA, 13708 bp, Homo sapiens
  source 1..13708: mol_type = genomic DNA
actggcagctggccgggcgctcgcagtgggagctgctgcaggctccgcggcggcggcaacggaggctgcgggggcggcggcgcgagcggccgggcttggtaggggagccgagcccggcccgggatcccgagcagcgagagtgtggggtacctaggcccctcacgctggacttcacagtctccgggccgcctgacctccgcacgggtatatgggatggaagcgggaccctcgggagcagctgcgggcgcttacctgccccccctgcagcaggtgttccaggcacctcgccggcctggcattggcactgtggggaaaccaatcaagctcctggccaattactttgaggtggacatccctaagatcgacgtgtaccactacgaggtggacatcaagccggataagtgtccccgtagagtcaaccgggaagtggtggaatacatggtccagcatttcaagcctcagatctttggtgatcgcaagcctgtgtatgatggaaagaagaacatttacactgtcacagcactgcccattggcaacgaacgggtcgactttgaggtgacaatccctggggaagggaaggatcgaatctttaaggtctccatcaagtggctagccattgtgagctggcgaatgctgcatgaggccctggtcagcggccagatccctgttcccttggagtctgtgcaagccctggatgtggccatgaggcacctggcatccatgaggtacacccctgtgggccgctccttcttctcaccgcctgagggctactaccacccgctggggggtgggcgcgaggtctggttcggctttcaccagtctgtgcgccctgccatgtggaagatgatgctcaacattgatgtctcagccactgccttttataaggcacagccagtgattgagttcatgtgtgaggtgctggacatcaggaacatagatgagcagcccaagcccctcacggactctcagcgcgttcgcttcaccaaggagatcaagggcctgaaggtggaagtcacccactgtggacagatgaagaggaagtaccgcgtgtgtaatgttacccgtcgccctgctagccatcagacattccccttacagctggagagtggacagactgtggagtgcacagtggcacagtatttcaagcagaaatataaccttcagctcaagtatccccatctgccctgcctacaagttggccaggaacaaaagcatacctaccttcccctagaggtctgtaacattgtggctgggcagcgctgtattaaaaagctgaccgacaaccagacctcgaccatgataaaggccacagctagatccgctccagacagacaggaggagatcagtcgcctgatgaagaatgccagctacaacttagatccctacatccaggaatttgggatcaaagtgaaggatgacatgacggaggtgacagggcgagtgctgccggcgcccatcttgcagtacggcggccggaaccgggccattgccacacccaatcagggtgtctgggacatgcgggggaaacagttctacaatgggattgagatcaaagtctgggccatcgcctgcttcgcaccccaaaaacagtgtcgagaagaggtgctcaagaacttcacagaccagctgcggaagatttccaaggatgcggggatgcctatccagggtcaaccttgtttctgcaaatatgcacagggggcagacagcgtggagcctatgttccggcatctcaagaacacctactcagggctgcagctcattattgtcatcctgccagggaagacgccggtgtatgctgaggtgaaacgtgtcggagatacactcttgggaatggctacgcagtgtgtgcaggtgaagaacgtggtcaagacctcacctcagactctgtccaacctctgcctcaagatcaatgtcaaacttggtggcattaacaacatcctagtcccacaccagcgctctgccgtttttcaacagccagtgatattcctgggagcagatgttacacaccccccagcaggggatgggaaaaaaccttctatcacagcagtggtaggcagtatggatgcccaccccagccgatactgtgctactgtgcgggtacagcgaccacggcaagagatcattgaagacttgtcctacatggtgcgtgagctcctcatccaattctacaagtccacccgtttcaagcctacccgcatcatcttctaccgagatggggtgcctgaaggccagctaccccagatactccactatgagctactggccattcgtgatgcctgcatcaaactggaaaaggactaccagcctgggatcacttatattgtggtgcagaaacgccatcacacccgccttttctgtgctgacaagaatgagcgaattgggaagagtggtaacatcccagctgggaccacagtggacaccaacatcacccacccatttgagtttgacttctatctgtgcagccacgcaggcatccagggcaccagccgaccatcccattactatgttctttgggatgacaaccgtttcacagcagatgagctccagatcctgacgtaccagctgtgccacacttacgtacgatgcacacgctctgtctctatcccagcacctgcctactatgcccgcctggtggctttccgggcacgataccacctggtggacaaggagcatgacagtggagaggggagccacatatcggggcagagcaatgggcgggacccccaggccctggccaaagccgtgcaggttcaccaggatactctgcgcaccatgtacttcgcttgaaggcagaacgctgttacctcactggatagaagaaagctttccaagccccaggagctgtgccacccaaatccagaggaagcaaggaggagggaggtggggtagggaggagtgtaggatgccttgtttccttctatagaggtggtgtaagagtggggaacagggccagcaagacagaccaccagccagaaatctctgatatcaacctcatgtcccccacccctcaccccatcttgtcacatctggccctgaccccactggaccaaaaggggcagcactggtgcccaccatacacacaggtgtctcatgtgactcacagtgctaaagactcatgcttgacagcttggtaaggtcaactctgtagccctgcagacaaaagctggttaggtttgggtttgatactttagatgggaaagtgaggggcttgagaaagtgggtgggaggagggaaggattttttaggagccttaatcagaaaaggactagatttgtttaagaagaaaaatgaaaccagacccagatcaatattttaggatactagatgttttaatgggttcagaatccagtttgtaggaagattttttaatggttttggttgctcctcccccagctgccaccccccaccttacccttattcctctctgtccacattttctgccccaccttacttctcctccctgacagacatccagcccctagtaatacttaaggcactatggcacttagctttgaagtgacacgaccctgtcttccttccgcccgctggtgggtaaccagtgccttccctgtaacggtaatgctgcagaactgcaaccttttgtacctttctttggggaatggggtgggggtgggagaggaggtagatggggaagaaataccccagacccaacaaacctccagccagaaagccagctattttgcatttgaaggaattgacttcctcattcattgagctttttaaaagatcacaacctcaagatggttaaaatccattgacatttgcactttcaaacatgacaagtctcggagctgctgagatgacaggcccctggcctttccacttatgcctccttttctccttattcctcctacctcccgccccgcccaggtctggagttactttcatagcatttttcactcttggcttcttttctcccttgatggtcaagtctcttatgtttcaatatttcttaactggggtgtcttataacaaaaaactcttaggtctaaaatgagaaaaaagagagaaaacaaaatgttatttttataccataacttgagtgtattgccaaaatttggaaatccttcccatgcctgatgagtttatatcccagaaacattgagccatcagaatgaactgtgtacctgatttgttctctgacctggctaggtagggagggggtggttatcgccccaagatggggtccaggctccatccttcctctgtgcagataatacctttttcttgctatagcctccctcctctgcactgtcctgcactctttcttgcaagtgcatctttttccttcccctggactgtcctctgaccctttggctcatcctagattgcagtgtgtcctgtggacaggctggggaattttgctgctccctattgcttctgtttacaaaaatgaatttttcctggtttcccactagggcatgtgggtgggtggcatggacttttttttttttttttttttgtcttgagacatggggtttggctgtcttgcaggactggagaaggtggtggttctagcttggtctctgttggccttgaagcaagcatcccccctgccctttttccttgactgttcatttttttcctgccccactgcttgggatggggagttgcaacttcagtgtggaatttcctctttgaggagcctgggcttggatctatcctgatctggtgatgaagccatgattactttagacctagcccaggcttggaggccagctggaggaagaagggtctaaatcctggcctgtagagttagaactaccatttcctccccttagctgcccttgtatgacccggatttgctatgcaaaacaatctatcccaggttctgttctggttggctacattgttcagcaactcacaaaacgtagcacaaacattcattatggagaaagcatcaggactgttgagtaactcctcctttacttttttcctgctggctacagcatggggtgccctataggcacaagcccagctgaagaacagaatggagggctctgggaggaggcagctcactggagagcctacattccttacacaagtgcctaaagagagtgatgctaacactccatctgccctgtccattgccttcatatacagtctacttcgtgttctgtcaccctttggggaggggagttctcctgggacagtgggctctgcatgttctccacttggatacattttggggctaggatcagggcactattcctggagggtccagtcattcaccagcatttgcaaatgtccatagggagcaggtggcagcctctactcccagcaacaagtttgtgttctctccttttctctctttgcctcactctctccagttggttttcagctggggcttgaaatgcatttttagccctttgacgtggcttatgccattcaagaaataaaaagcaagagaatcagctttgggcaatgacaagaaatgagttcttactctgatttttttgtaaaaagataatttttgagacttgaaaaataccccgaccttgagattattcctgtttgaaaggtggtgcatgcagatggagaagtggtgttggcagcaagctttggctcatgtggatttggtttaagtggtgcttcttacccaagcttcaaggaagtgcttgggggacccccagcctcatcctcttagttgggtctcttgttccctttgtaccactgttttgccttccttttcctcttctctctttgcctggcttcctttcccttttcttctattcactctgcttgcttgctggccggcctgcctgcctgcctgcctgcctgcctgcctgtctgcctatgtgatgatgaaatctctgcatggctgcaatgatcccactgttagctggcagggtcaggcttagctccttgactgcagaagaccaagaacctgttccccaagcccagagatgtccacctgggctggactgccctcaagcttatactagagaagagcaactgacctgcccaacttgtgtgaagtcaggagggtttctggcattttccacacctgtccactccttggagctggtttctctcattgctttttctaaatctggttctttttctctttacctggggcctggcttttctgagattgtcttagggttgagctatttgggtatcctgggtttgagtgttaggggatggacataaaggaaaaagagtgatgagaagagaatggagagaatttgaataaaaggtgggaaaggagagcactgttctttgattgtttatccagtccaacctgatccattagggatcgaggtgctacactggcctccagggataagcctggggctactgttgctgggaacttaggcttaacataaagccgaagaaggtacctagaaatttgaaacttccctaaaaagctcctaatgcccacctgctagatagcttctctgtggcctcctatttagctaagcagcagtgtttttggatactttttttttctgtttgtgaataaggccagcactcaagatgggcagccaagggtgcactgactattagctggcccataggatatctgtaaggctggtgggacagttttggacctggaatcatgtgtaactaacaaggttggacgtttcttccccatcagggtagaaaaatcatctcaaactagccaaaaggcagttttggaaactacattgggggacgttatttttatttatatatggggcctaggccaatccaggatggtagctggaataccttccttcttaaaatctgatcatggcagggatatgcagggcactttttactatttggccttctaagcagattgggaaggaggtattttctggttttcgctttcctccgacttaataggacttgccttctccctgggcagggagagaggctgggttggtgctctcccttactctactcatactgacttagagcctctggctgctgtttgggcatccaagaaagggaggggaaggaatgagctaaaaacaaaacagaatgaggtgggaaagggagattttcttctttacagaggaaaataggaaaccctccaagaattgtgcaagtaaagacatttgttgaatgcactgagtcccttggtgtagtagcaataaggaaaaatgaaattactttcctgtgcacacagtccagcctaattggtatgtgatgttgcacttagcagccatgtggtgggcatgtgtgactactctggttttcactttagtttctaaactttttatccctctcaagtccagcatggatggggaaatgtctctggatccccacagctgtgtacttgtttgcatttgtttccctttgagatttgtgtttgtgtcctgctttgagctgtaccttgtccagtccattgtgaaattatcccagcagctgtaatgtacagttccttctgaagcaagcaacatcagcagcagcagcagcagcagcacaattctgtgttttataaagacaacagtggcttctatttctaaagtgcggtctttctctttttttttcctaccagcaaaacaaacttttgggactgattacatctctaatagattttaggtgagaataatactgtagattgttatgcaggaatacttcacagagccttcatttattcttcattcaacaaacatgcaaagcactgtgccagcagtattgtggggaggggaggcacaattcaaaatgaggaaaatagtgtccgtctcattaagggaattaagtttggtgggggatatgattagccaaatagtcccctggcataggaggaagataatgagggagtggaataaggctacaacaacgaatatagggaggaagggacagatttgagagacgaggtagaattaataggactcgatggctggtgggaggagaagacaggagtagaggttagctcccaggtttctccttgaccataggagtgtgttgggacattctgccagtcaagatgggggtgacggggagactgtagaaggaaggtggggagtttttgaagaaacagaatgttgtatagactgagttttgaggtgtttgtggggcagtaagggtaaggtgtccagtaaacacaggttggtgctcaggtaagactgtaaaactgcatttatagatacaggagtcttatagatggtagttaaagccataggcatgaatgagatagcttagaaaaagagaagagaaactagtatacagccccctaagaaactcaatttaaaggttcgggggaggaagcagatcttaaggtgacagatcactggtagacagtttgtgggttttttgtttctttgtttagccagtttggtgaggtaggagaagaaatcagagtagaagaaggttcatgaagggagtgattaacaacatgaactgctgcagagagggagttctttttttttctgtgtgttttacctttctactccccatcttttggggatcttgtaactctatgacttacttacgttattctccagtatttcttgaaaatgagcattggaaaaaccaattctaaaatggctaaaactaggactttcaagttcaccacaactaccaccaattaggagataattgtaaaagaataaacaaaacctaattttgttcctagccaatattataaaccatgttccagcatactagataatagtagcatactatatttatttccataatttgtcttctttagagcctatgaactcctaggagcagaagctatattctcttcatttttgtcatctcagggtcatggcatataccaacagatcagtatgtgcaaatataattgaaataggctagtagtctgtggtttatgagtatgggctgggtgggcagtggatcaagaagtgataggagtacacaggatgaactcagaattcctgaatcttcaggtaagcagatacttaactacattatcattgtcttttcccactcaccccaagttggaggttctatggttttgtactttaagctggtggtataattgtcaagcatgtaaattctggcattcttcctggtactgctagagcattgttatttctatgcatgggggtaagaaggctcagagaaggatcctggcggataccccagtgagaaatcgtcagtggcagccagtgtgtacatacgtggacctagcattcctctggaggccaagtgttgtaaattggcctgtggctatcatctggcagactcccttgggaaagagccagccagccccatgcttcttttcagcagcaagggttagggaggttggttgaacttgaagagcagattggacatggagcagattttgaccagttgaaataagacataaatttatgactccgagtgaggcagaaataaagaacttagcagggggaataggaggaggatgattatggcaaattttgctataaactttagttttagaaaagattgatattgaaaagccttcaggatttgcctgtggttgctactcaagttaaaaagactgggagcctgcattgtttggtcctggagctcaaggttttcagtgaaggcttgtcctggcacctctgggcattccttttcattactggttgagcatccttccttctgctctgtcaattggcaaaatatgctggagcacattctggactagcagttgccttggggtagtcaggctgggtatttgtttggtatctcttggtgtagcagaccccagaatctcatggcaattaggatttggtggctaaacgaaagagttagtgcaaggaaaagcctagttggaatttctgagtctgggccatccttaagctgctgtctactgcctgaatgggaagtaatgtcgaattggaaaattagctcaccatttttgttctagctttgcagacatttattcctctgatgataggctgagaaatgcctaggccggcttagaaggcacacagcatgacagaagtactccttcaaagcagctgtgtcaagaaggaagagctggaaaagtggatttgctggggaattagatgcatttagttttccacttacgcacaactgccttctccagtatatcataccaaggttttttaggcctttgtggcttaccctgcaggaacatactgtgtcctgttgttctggactgtagcatcttcaccaccatcctcttggcaatggttttttgtttggggtttttttttttttttttttggacaaagtataataatattgagggacctttctagggagcctttggtcctttgtccccattttccaaagggagggaactttcctcttaaaagagacagtgggaacttttagccaggtttttggaaaaggcctgtgggctattaatgagagtgagctgcaaaaggaggaagggtttgtttgggtactttgaagtacttagctaggtgttttctacagtatcttatataattgcatcttacagcatctttacatgcgaaatagtttatcagttatcttcaattgcatattacaaaattctgattaaatttttcttaaataagaaaactatcatttcatatgacaagaaatcctaatttaatgttactccaaggttggttaattcagtggctcagtgataacaccaaagactcagtttcttgaaatttttttgctctgccatcctccatgtttatcctcacgccagttcgcctcatggtcccaatatggctactgtaattctgggaaggaaatgctgacagaaccgtgtctggcaaaagagagacagatttttctgtgtccttctaaagcaaggaagtcttcccctggaagctccaacagatacggcctcatggctttgctagaaatgggtcatctcactcctgtcattggcaaagcaagtaagatcatccatcaggagtggcttagattaatgaattatcctttgagtcgtgtagactagaaagttcagtcatgtctactagcaagaaaggagataagggctgttggataagcagcatctggtctcaaaggtacttcaacttttacagatgagaaacatgaatcagagtgactttcccaggctcacagcaagtaagagagggccttcagtgttagctgtgtctgtccctaaagcccatgttttatattgtatcttgctagagtataaagtaacttactttctaccttgtagaaactgatggtctaggagaagagatttgaactcaggtgcccagttgactctaatcttggcccatgtgagaggattgtactcagttgctctcctcatccagtgatgtttcttgtctaacacaagaagcctaggagtagaaagtcctaagcagagtagaataatagcggcagcagggagggaagtgtgaactgtgtgtccctgagcctgacttactgggcagggacatgacacttaaagcggcagctggccactctgtctttcctgcatgcactgagtatttggtagctcattagtgaccagtgatattgatcatcttttcatgtgctcacttactatccccatatctttgttgtttgcatcttttacccattgtatttgttgtttttgagacagtgtctcactctgtcacccaggctggagtgcagtctcatgatcgcggctcactgcagtttctgcctcctgggctcaagcaatcctcccacctcagcctcctgagtagctgggcttacaggcgcacaccaccatgcccagctaattaaaaaaaaaattttttttgtagcagttcggtctcattagtattgcccaggctggcctctcttagcttcaagctatcctcccgcctcggcctcccaaagtgctggaattacaggcataagccacaagccactgggcccagcctcttttacctgtttcaaaattgagttttattgagttgtaagagttctttattcattttaaacacaagtcctttgttggatatatcttttacatctatttttcccagtctgtggcttgccttttcattttgaagagcaaaagtttaaaattttgtgaatttattaaagctccgtttgttgcttttttctgttctagtttatacttttgtatcatattttaggaaattttgcactgggtatttgatggctcctgaggaggttcaactttcagagcgcactgatttctctgcacctgagattttgtactatttctgtatttctttcttctcagaacaaccagtgtcaccaggtatgagggcagagttttagcttgtttgctgagccccattcttgaagctcatttatttattcacctatctgtccatcaatccaacaaatatactgaatgctgctatgtgccaggtactggcactgttctaggtactggggcaatgacagttaagataatacccaatgaccctgctctgtacccttaagagcagactcagttgggaatgagttatccaaatatagggtgtacatgtagtcaggagagagcctcatacagctttgcctttggcagaatccttcaaacctctttgtcttcctacttcttgatattacaaatcatgagcctttcacatgcattgactctaaagaggtgggttcctggatagcagaagtagataggaaggcatcattgacatttactgagatggattgaatcagagggtgtaaattctgctccatcaatgttgaaaaagactagcccaccccaaaggtttatcactgtcaccatgtctaatgtctattctggaagaagctgaagaagtctgcctttgtttagggaaccggttccagaatcagaggggttgaggatataaaagacccttgcacaagagttggtatttaccctgtcagatgctgctaccaagatttggattgtgtacagtcgaggattaaaaatgacttttaagatgcagtgtttcatctggtgacatttaatttgatattttaaaattggggagggtattttcagccatgggggtagggatgtgaaagaagaagaaagtaagaattggagtcagatgtggttttgagtcccatacatttattgtttaatattatatggtaagtactttaaaatggtaaatagtaaatacttgtgttattcactaacatttggggaggattttctctgtgctttatgtatattacctaaccttacaaactgtgtaaggtacatgctgttctctcaatttttcagataagaaaattgaagcccagagagatcaagtgactgatccaaagtcccacagtgaggggaactgaagataggatattctttctccttttcctctttaaaaaattattttgattaaaaaaaaccgtattactgaagcatagggacatggggagaaattatgaatgattcctcagcctgaataaaatagtatgtttcattaaggcaacaaatatttattaaggacctaatatttgcctgacattcaagtgaggtggggggcacacaagtagtaaataaataacagactgggcaaagggctaccaaggcaatactgtagtagactaacaggtgccccaccatagatgggtggtccggaaaaggcgtctcagatgtctttcgttgagacgcaaaaaaaagctgtggggtagggcgtaaggggagggtggagaagagagagagggttcctggccaagggaaccaaaagcagagaagctccaagtcagaaaaaagcagcggttggcccgttgggagaattggaagccaaccagtatagctgtagcacaggcggggcccatttacgccgtgcgttttcaccctggaaaggagtttgggttttcaagtgtgacgaggcgctattaaagagttttaaacatg

SEQ ID NO: 3 - DNA, 7764 bp, Homo sapiens
  source 1..7764: mol_type = genomic DNA
gtgaagctccagacgcatggcacccgccgccaagtcgccgcggtggctgccgggatgcgccgcagcgaatggtcgcgccgggcgccgctctgagtgacctttcacccgcgcccagcggttccgggcggcagcacaaggcggtagccatggcggaggcggcggctgcagcgggtgggactggcttgggcgcgggcgcgagctacgggtctgcagcggaccgggaccgggacccggacccggaccgcgccgggcggaggctgcgggttctctctggccatctgctgggccggccccgggaggctctgagtaccaatgagtgcaaagcgcggagagccgcgtcggcggccacggcagcgcccacggccactcccgccgcgcaggagtcgggcaccatcccaaagaagcggcaagaagttatgaaatggaatggatggggatataatgattctaaattcatcttcaataagaagggccaaattgaattgactgggaaaaggtaccctcttagtggcatgggtttaccaacatttaaagaatggatccaaaatacccttggagtaaatgtggagcataaaactacctctaaagcatccttaaatcctagtgatacacctccttctgttgtaaatgaagattttcttcatgaccttaaagaaactaatatttcatattcacaagaggcagatgatcgagtatttagagctcatggtcattgtcttcatgagatatttttgctcagggaaggaatgtttgagcgaattcctgatatagttttatggccaacatgccatgatgatgtagttaagattgtgaatctagcttgcaaatataatctttgtatcataccaattggtggaggaacaagtgtttcatatggcctgatgtgtcctgcagatgagacaagaacaattatttctttggacacttcacaaatgaatcgaattctctgggttgatgagaacaatttgacagctcatgtagaggctggcataacaggacaagagttggaaagacagcttaaagaaagtggttattgtacaggtcatgaaccagattccctggagttcagtactgtaggaggatgggtatctactcgcgcatcaggcatgaagaagaatatctatggcaatatcgaggacctggtggttcatataaaaatggtaacacctagaggtataatagaaaaaagctgtcaaggacctcgtatgtcaacaggccctgatatccatcacttcatcatgggatctgaaggaactcttggtgtaataacagaagctacaataaaaatcagaccagtccctgaataccaaaagtatggctcagtagctttccctaattttgaacaaggagtagcctgtttaagagaaattgcaaaacagagatgtgctccggcatctattcgcctcatggacaacaagcagtttcagtttggtcatgctcttaaacctcaggtttcctctatttttacatcatttttggacggattaaaaaagttttatattacaaagtttaaaggatttgacccaaatcagctaagtgtagccacattactgtttgagggggatcgtgagaaggttcttcaacatgaaaaacaagtgtatgatattgctgcaaaatttggtgggttggcagctggagaagataatggacagagaggttatttgctgacctatgttattgcatacattcgagacttggctttggaatactatgtattaggagaatcttttgagacttctgctccttgggacagggtggtagatctctgtagaaatgtaaaagaaagaataacaagggaatgcaaagagaagggtgttcagtttgctcctttttctacatgcagggtgacgcagacttacgatgcaggtgcttgtatctacttctattttgcctttaactacaggggaattagtgacccactgaccgtatttgaacaaactgaggcagctgctagagaagaaatccttgctaatggagggagcctgtcacatcaccatggagtgggcaagttacggaagcaatggctaaaggaaagtatctctgatgtcggctttgggatgctgaagtctgtcaaggaatatgtggaccccaataacatctttggaaacagaaaccttttataaatccattagtaccattacaaaaaaatgtcaattttttttttaagttttcaactgtggttatactagtaatcaaatatatcatggactatattttggatacatttgtttctttggtttaaaataagtttgttttcattctgtagtttgttttgtttctacatctatggattgacagatagtattcctaaatctctctcattgtaggtacatcattttacattcagcggttgtcatttcaaattttagtcaggcagcacaaagctgtcaattattccagaggaagctgctgccagctgttttgtattgttgcttcctcttggggaacaaagacagatttggtatcattgattgctcagctagcctctttttaaaagaacgtttctgggaatcagatgtctagggaaggattccactgaggagtgatacacgtgtacattgtttaagagcatagtctagtgtgagtaggccattaaggggaaggatattcatgaaagaatttaggcaacctgttatttagaaagccttcacgtctgtaaggtgcttggcctacttttttttttaaattagtatacatgcataaaaccttgtatcatcaatatacaaattattctgttaggggacatgtttttgttctccatgtttctgtttctattgtggtatgagttgtatttgtatcactgagataacctattgttatattctaattcattgataatatgttttgtaagaaaagctgacatccttcattgcaagtgaagaacaggtttaccatgaaatgaatgcctttattcaacttagagtcctaatgtttctgatttcacattcttgttgctgaaatgcagaagaaacagctacagcaagagcagaaggaaaactcttagacttaatgtctccaattgcaagaattgtttcactaaagaaacagtcatcattcaactactgaatttgaaagcctcagcagtttcaatgacaaaaatcatttttgattttttaaaattaatcccaatggcatgataaattttcatataaaaagtaaagtttcaatttagtttttaataatggtttaatgccttttttgaataactggtttaacctaattttttttaaatgtaatgtattaatgcatataccataatcaaaagtttgaaatatcctgtttcttaaataatgagaacattaatcacatttagcaagcatttgtacattcaaacctggatattaaagtgaaatgattactttgaatcactgtctgccaaggttcatgattcacattttgagatggattcttttcttaatgcaatacctaacttttgataattttttaaaactaatatttgatcagataatgtaagtcaaaatgcagacgatcctttaaaaggatgcattgtctgtgtatgtagcaacagctccaaagtatttttgggcagtttgataccttttatatctgaagtagccttaaccagaaaaatggtaatttaaaattgacaaaatgatatttttaagacttcaaaatgataaataatttttaactattaaaattggcctcaaactaataaatctgtaattaaattagaattaaatatcagtttaacaacaaaatgaaatatttattttttagaagctgcctctcttcattggtcatttatttttaattataaaatttccaacagatctttgctttaagcccttgatatttgacctagttggacacttgatgaggaagttgcctctagaattataaaaatctcagctttataaaatgcatctgttcacgaaggtaatttctttaattggtgatcaaaatataaaattaaggtactaatgtctcactggaagtatatatatatatatatatatatgtatgcatgtgtgtgtgtgtatatatatatatatatatatgtatatgtttctgagtaatttttaaaaaataaaacaggttaataagaagatccattcctttgcatgtgattgttataacattctttcccagggagttcaatttcagcaacctcagaaatccatacttgatattaggaaactgtaaatgtaacacctgaaattattatgttcactattctacatgaaccttatggaaattcatgatttatgtctttgtttttctttttccaagtatatgcaggactccccaaccttgattttataatggtgactgcattttgtaggtggaatcatttctaccgaaatcattttgaaacacaagaatattgatcagtactgtttcactctgatttagtaaatcagaaagcctccccctacccccagcccccactttcacataccttctgggaggtgcctcagtatagacttggtatctgtgaaggactgagttcatgaatatgcacagaagcacttaaaccatgcctcttatttctataatatctgaaaatggcttcataaaagttaagtcaggagaacactgtttacatgacacttcttaactcatttttaatgtttatttttaatttcaaaaacttgttgcctatttggttttcagtactgcataacactgactttcttaaattagtcatagttgcaataatttacttaaatttggtaatgtcacatttgggttggggtttcagtgggaatagtaacttgccgctagtgagaaatggcattgaatactaaagactcaatatgaacaggctttatagacccttagagaaactgttgccttaatgtttggtgcaatttctagtagtgcataagtgaatttagtcttatgataagtaactttgagctgtttttagcttagtaagaattgtggaaaccacatgtttattgtgcccatcattttacacaaagaaaagaggattatattatttcttctaaggaagtaggagttttcttcctaaaagtgcttacatattgtagtactattacttaaaagttatttatgaagttgggagccttctagtttgcctgtgttgatgtattttgaaaacaaaattgcaataaaggatgagcttccatcggtgtgtatggtataccagatacagatggttgcaaggaaaccttttcccccactagaatagtctattagtaactgctaagtcctagcttgcatttttgaaaatgcctttctgcatgttagcacccagactttcctttgtcatattcctttatagctacaacttaactgtagcttatcagagaagctctgtagtcctacactgaagtgtgttcccttggctgttcatatggggctgggtttggttgaacttccattctgtataaatgctagaacacagttactacagattgattcacaaactgcatgtgctggtgcttgaggcagccaaaatggaatgctgtggaaagcatatctatatcttaaaaaacactcagacaggagttaaggacagctttaataatttttttgtttaccacttaatctttatcaactttgattttagttagggcttagctcatggttgaagaaaagtggaaaataacaagtgcccatttaggtttgaagaatccagaatgttttacctttgactttatgagttatagaagcttggctttgctctaggcttcatgttcccaaatgagccatctgtcagtatattcacttaattcttactaatttcagtttcctgtaaaggaaacaacttacatattgatgcttaaatccagaaagtgtaaaaggttttcttaaactgttaaaatatagtgtctgatataaaggatgtaagttactcagctttctgctccctaagccaaacagtgtttgtcttcagtgtgaaatttaactgtaaaaactacttgtaatgtcaagagattatagatcatattattaataaaatggacctgggtctaatattttttttcttcaaagggagtgtgaagctgtttattcttttatttgcatatgagtttttcttttagttttagtttttcatgttcatatttccactgatttgaaaacacaaaatttatttttataattttgttgcttgtagcataatcaagtgcaaaatcaagtgcaacctacttgtgactaaatctctttggatttatagctgaggatattgttagctaggttttgtcaatccctaatcattttttaaaatcaatgctgtattcccaggaggctttgagactcctatgaacctgaagcactcccttttgaaccttggaagatcctcaaagagtgagcactcttgtgctcttctaatcataattaattccttaacaaatcagagtaaggaccactgacatatagaaccctcaagccaaagaaccatcacagaatttagtaactttagttctgtgaacatgaaaagatttcttttttggtttccaaaggagattatttatttttccacaaggaaaaacatcttgcagagactctgaattccaaatctgagtgagaaagaaaaggaaaaaaatctgtttcatggtggatttctaagcaacatatatacatgtttttaagacaaccttttgttggcagtgtttttcctgaacaccatatgcaccctaggaaacatgtttttcctttaatcttgttcacatatcagaaaaggacatgaaatgctcatactggcatacaagtttctataagtagttattttttgagctacttatactatatccccaaaagctcacagtgccttgttgggattttttttttccatgaactagccattattttaaatgagtgggagagggtaagtctttagacagaggtcattcagcagttcaagactattcctcttcaagaacatgtcaggaattaagcagttatatgtggaaacactggtaattctttccacagtgttgttttggataatctgttctagtatatttaactaattgtatggtggacctgtactctgatacacatcgaatcagtcaatgggatttgtatgtgcttttccttcctacattttcattcctactgccccaacctagtagccctaagttgtggcttggtgggtttggcattgagcctcaagacactcactacattctttctggatgtttgctcacaggctccctgaggagcagaacctgtggagctggggagtgcgggtggtttctattcctaatattgtgtgtcagtcctttttcgtgtgatggtgccttcagaataacgaatatttctgttctggacaatgattaaatcttatgagaaatatatgtaggttatattaattcttgtccatttttgctaagcctgtgaaatactttggctctgatacaacttaacttgaataatatcttatcctgagtcttcctccaaggcagtacatattcctgccaggactgtagtaatcctttgggaactacatgtgagtaagcacttgtatgtaagccattatactgctgtaactaatgcatacaaacaattcttctctttacatttatagtctaaaaggggatatgcagtgggaaggaaaattcctgagagattccagcatagctttgtcaattccgactgagccatactgttttccacaagggctcaacacatagtcagtattccgtgctttcagtgtgtgttcagattctcctcttactggttttcttagactgtattgttctataagcaaatgcccatgtgtgatttttaagatgtgctggggaaaaataaatcaataccacaaccacc

SEQ ID NO: 4 - DNA, 7058 bp, Homo sapiens
  source 1..7058: mol_type = genomic DNA
agtccaatggatcagatgggcaagatgagacctcagccatatggcgggactaacccatactcgcagcaacagggacctccgtcaggaccgcagcaaggacatgggtacccagggcagccatacgggtcccagaccccgcagcggtacccgatgaccatgcagggccgggcgcagagtgccatgggcggcctctcttatacacagcagattcctccttatggacaacaaggccccagcgggtatggtcaacagggccagactccatattacaaccagcaaagtcctcaccctcagcagcagcagccaccctactcccagcaaccaccgtcccagacccctcatgcccaaccttcgtatcagcagcagccacagtctcaaccaccacagctccagtcctctcagcctccatactcccagcagccatcccagcctccacatcagcagtccccggctccatacccctcccagcagtcgacgacacagcagcacccccagagccagcccccctactcacagccacaggctcagtctccttaccagcagcagcaacctcagcagccagcaccctcgacgctctcccagcaggctgcgtatcctcagccccagtctcagcagtcccagcaaactgcctattcccagcagcgcttccctccaccgcaggagctatctcaagattcatttgggtctcaggcatcctcagccccctcaatgacctccagtaagggagggcaagaagatatgaacctgagccttcagtcaagaccctccagcttgcctgatctatctggttcaatagatgacctccccatggggacagaaggagctctgagtcctggagtgagcacatcagggatttccagcagccaaggagagcagagtaatccagctcagtctcctttctctcctcatacctcccctcacctgcctggcatccgaggcccttccccgtcccctgttggctctcccgccagtgttgctcagtctcgctcaggaccactctcgcctgctgcagtgccaggcaaccagatgccacctcggccacccagtggccagtcggacagcatcatgcatccttccatgaaccaatcaagcattgcccaagatcgaggttatatgcagaggaacccccagatgccccagtacagttccccccagcccggctcagccttatctccgcgtcagccttccggaggacagatacacacaggcatgggctcctaccagcagaactccatggggagctatggtccccaggggggtcagtatggcccacaaggtggctaccccaggcagccaaactataatgccttgcccaatgccaactaccccagtgcaggcatggctggaggcataaaccccatgggtgccggaggtcaaatgcatggacagcctggcatcccaccttatggcacactccctccagggaggatgagtcacgcctccatgggcaaccggccttatggccctaacatggccaatatgccacctcaggttgggtcagggatgtgtcccccaccagggggcatgaaccggaaaacccaagaaactgctgtcgccatgcatgttgctgccaactctatccaaaacaggccgccaggctaccccaatatgaatcaagggggcatgatgggaactggacctccttatggacaagggattaatagtatggctggcatgatcaaccctcagggacccccatattccatgggtggaaccatggccaacaattctgcagggatggcagccagcccagagatgatgggccttggggatgtaaagttaactccagccaccaaaatgaacaacaaggcagatgggacacccaagacagaatccaaatccaagaaatccagttcttctactacaaccaatgagaagatcaccaagttgtatgagctgggtggtgagcctgagaggaagatgtgggtggaccgttatctggccttcactgaggagaaggccatgggcatgacaaatctgcctgctgtgggtaggaaacctctggacctctatcgcctctatgtgtctgtgaaggagattggtggattgactcaggtcaacaagaacaaaaaatggcgggaacttgcaaccaacctcaatgtgggcacatcaagcagtgctgccagctccttgaaaaagcagtatatccagtgtctctatgcctttgaatgcaagattgaacggggagaagaccctcccccagacatctttgcagctgctgattccaagaagtcccagcccaagatccagcctccctctcctgcgggatcaggatctatgcaggggccccagactccccagtcaaccagcagttccatggcagaaggaggagacttaaagccaccaactccagcatccacaccacacagtcagatccccccattgccaggcatgaggagcaattcagttgggatccaggatgcctttaatgatggaagtgactccacattccagaagcggaattccatgactccaaaccctgggtatcagcccagtatgaatacctctgacatgatggggcgcatgtcctatgagccaaataaggatccttatggcagcatgaggaaagctccagggagtgatcccttcatgtcctcagggcagggccccaacggcgggatgggtgacccctacagtcgtgctgccggccctgggctaggaaatgtggcgatgggaccacgacagcactatccctatggaggtccttatgacagagtgaggacggagcctggaatagggcctgagggaaacatgagcactggggccccacagccgaatctcatgccttccaacccagactcggggatgtattctcctagccgctaccccccgcagcagcagcagcagcagcagcaacgacatgattcctatggcaatcagttctccacccaaggcaccccttctggcagccccttccccagccagcagactacaatgtatcaacagcaacagcagaattacaagcggccaatggatggcacatatggccctcctgccaagcggcacgaaggggagatgtacagcgtgccatacagcactgggcaggggcagcctcagcagcagcagttgcccccagcccagccccagcctgccagccagcaacaagctgcccagccttcccctcagcaagatgtatacaaccagtatggcaatgcctatcctgccactgccacagctgctactgagcgccgaccagcaggcggcccccagaaccaatttccattccagtttggccgagaccgtgtctctgcaccccctggcaccaatgcccagcaaaacatgccaccacaaatgatgggcggccccatacaggcatcagctgaggttgctcagcaaggcaccatgtggcaggggcgtaatgacatgacctataattatgccaacaggcagagcacgggctctgccccccagggccccgcctatcatggcgtgaaccgaacagatgaaatgctgcacacagatcagagggccaaccacgaaggctcgtggccttcccatggcacacgccagcccccatatggtccctctgcccctgtgccccccatgacaaggccccctccatctaactaccagcccccaccaagcatgcagaatcacattcctcaggtatccagccctgctcccctgccccggccaatggagaaccgcacctctcctagcaagtctccattcctgcactctgggatgaaaatgcagaaggcaggtcccccagtacctgcctcgcacatagcacctgcccctgtgcagccccccatgattcggcgggatatcaccttcccacctggctctgttgaagccacacagcctgtgttgaagcagaggaggcggctcacaatgaaagacattggaaccccggaggcatggcgggtaatgatgtccctcaagtctggtctcctggcagagagcacatgggcattagataccatcaacatcctgctgtatgatgacaacagcatcatgaccttcaacctcagtcagctcccagggttgctagagctccttgtagaatatttccgacgatgcctgattgagatctttggcattttaaaggagtatgaggtgggtgacccaggacagagaacgctactggatcctgggaggttcagcaaggtgtctagtccagctcccatggagggtggggaagaagaagaagaacttctaggtcctaaactagaagaggaagaagaagaggaagtagttgaaaatgatgaggagatagccttttcaggcaaggacaagccagcttcagagaatagtgaggagaagctgatcagtaagtttgacaagcttccagtaaagatcgtacagaagaatgatccatttgtggtggactgctcagataagcttgggcgtgtgcaggagtttgacagtggcctgctgcactggcggattggtgggggggacaccactgagcatatccagacccacttcgagagcaagacagagctgctgccttcccggcctcacgcaccctgcccaccagcccctcggaagcatgtgacaacagcagagggtacaccagggacaacagaccaggaggggcccccacctgatggacctccagaaaaacggatcacagccactatggatgacatgttgtctactcggtctagcaccttgaccgaggatggagctaagagttcagaggccatcaaggagagcagcaagtttccatttggcattagcccagcacagagccaccggaacatcaagatcctagaggacgaaccccacagtaaggatgagaccccactgtgtacccttctggactggcaggattctcttgccaagcgctgcgtctgtgtgtccaataccattcgaagcctgtcatttgtgccaggcaatgactttgagatgtccaaacacccagggctgctgctcatcctgggcaagctgatcctgctgcaccacaagcacccagaacggaagcaggcaccactaacttatgaaaaggaggaggaacaggaccaaggggtgagctgcaacaaagtggagtggtggtgggactgcttggagatgctccgggaaaacaccttggttacactcgccaacatctcggggcagttggacctatctccataccccgagagcatttgcctgcctgtcctggacggactcctacactgggcagtttgcccttcagctgaagcccaggaccccttttccaccctgggccccaatgccgtcctttccccgcagagactggtcttggaaaccctcagcaaactcagcatccaggacaacaatgtggacctgattctggccacaccccccttcagccgcctggagaagttgtatagcactatggtgcgcttcctcagtgaccgaaagaacccggtgtgccgggagatggctgtggtactgctggccaacctggctcagggggacagcctggcagctcgtgccattgcagtgcagaagggcagtatcggcaacctcctgggcttcctagaggacagccttgccgccacacagttccagcagagccaggccagcctcctccacatgcagaacccaccctttgagccaactagtgtggacatgatgcggcgggctgcccgcgcgctgcttgccttggccaaggtggacgagaaccactcagagtttactctgtacgaatcacggctgttggacatctcggtatcaccgttgatgaactcattggtttcacaagtcatttgtgatgtactgtttttgattggccagtcatgacagccgtgggacacctcccccccccgtgtgtgtgtgcgtgtgtggagaacttagaaactgactgttgccctttatttatgcaaaaccacctcagaatccagtttaccctgtgctgtccagcttctcccttgggaaaaagtctctcctgtttctctctcctccttccacctcccctccctccatcacctcacgcctttctgttccttgtcctcaccttactcccctcaggaccctaccccaccctctttgaaaagacaaagctctgcctacatagaagactttttttattttaaccaaagttactgttgtttacagtgagtttggggaaaaaaaataaaataaaaatggctttcccagtccttgcatcaacgggatgccacatttcataactgtttttaatggtaaaaaaaaaaaaaaaaaatacaaaaaaaaattctgaaggacaaaaaaggtgactgctgaactgtgtgtggtttattgttgtacattcacaatcttgcaggagccaagaagttcgcagttgtgaacagaccctgttcactggagaggcctgtgcagtagagtgtagaccctttcatgtactgtactgtacacctgatactgtaaacatactgtaataataatgtctcacatggaaacagaaaacgctgggtcagcagcaagctgtagtttttaaaaatgtttttagttaaacgttgaggagaaaaaaaaaaaaggcttttcccccaaagtatcatgtgtgaacctacaacaccctgacctctttctctcctccttgattgtatgaataaccctgagatcacctcttagaactggttttaacctttagctgcagcggctacgctgccacgtgtgtatatatatgacgttgtacattgcacatacccttggatccccacagtttggtcctcctcccagctacccctttatagtatgacgagttaacaagttggtgacctgcacaaagcgagacacagctatttaatctcttgccagatatcgcccctcttggtgcgatgctgtacaggtctctgtaaaaagtccttgctgtctcagcagccaatcaacttatagtttatttttttctgggtttttgttttgttttgttttctttctaatcgaggtgtgaaaaagttctaggttcagttgaagttctgatgaagaaacacaattgagattttttcagtgataaaatctgcatatttgtatttcaacaatgtagctaaaacttgatgtaaattcctcctttttttccttttttggcttaatgaatatcatttattcagtatgaaatctttatactatatgttccacgtgttaagaataaatgtacattaaatcttggt

SEQ ID NO: 5 - DNA, 8642 bp, Homo sapiens
  source 1..8642: mol_type = genomic DNA
gcgccgccgccgccgccgccgccgccgccgccgccgccaccgccggcccatgactgagccccgccgccgccggccgaggaatgggctccgggctctggtaggaagcgctgggagcggggggcgcttttaaaacaccgatctgggttttttaaaaacctcctttgaaaaaataatggcaaactcgacggggaaggcgcctccggacgagcggagaaagggactcgctttcctggacgagctgcggcagttccaccacagcagagggtcgccttttaaaaaaatccctgcggtgggtgggaaggagctggatcttcacggtctctacaccagagtcactactttaggcggattcgcgaaggtttctgagaagaatcagtggggagaaattgttgaagagttcaactttcccagaagttgttctaacgctgcctttgctttaaaacagtattacttgcgttacctagaaaagtacgagaaagttcatcattttggggaggatgatgatgaggtaccaccaggcaatccaaagccacagcttcctattggtgcaattccatcttcctacaattaccagcaacacagtgtgtcggattatctgcgtcaaagttatgggctgtccatggactttaattcgccaaatgattataataaattggtgctttcactgttatctggactcccaaatgaagtggactttgctattaacgtatgcactctcctatcaaatgaaagcaagcacgtcatgcaacttgaaaaagatcctaaaatcatcactttactacttgctaatgccggggtgtttgacgacactttaggatccttttccactgtatttggagaagaatggaaagagaagactgatagagacttcgttaagttttggaaagacatcgttgatgataatgaagttcgtgacctcatttctgacagaaacaagtctcatgaaggtacatcaggagaatggatttgggagtctttatttcatccacctcgaaagctgggcattaacgatattgaaggacagcgggtacttcagattgcagtgattttgagaaatctttcctttgaggagggcaatgttaagctcttggcagctaatcgtacctgtcttcgtttcctattactttctgcacatagtcattttatttctttaaggcaattaggccttgacacattaggaaatattgcagctgagcttttactggaccctgttgatttcaaaactactcatctgatgtttcatactgttacaaaatgtctaatgtcaagggatagatttttaaagatgagaggcatggaaattttgggaaatctttgcaaagcagaagataatggtgttttaatttgtgaatatgtggatcaggattcctacagagagatcatttgtcatctcactttacctgatgtgctgcttgtaatctcaacactcgaggtgctatacatgctcacggaaatgggagatgttgcttgcacaaaaattgcaaaagtagaaaagagcatagacatgttagtgtgtctggtttctatggatattcagatgtttggccctgatgcactagctgcggtaaaactcattgaacacccaagttccagtcatcaaatgttatctgaaattaggccacaagctatagagcaagtccaaacccagactcatgtagcatctgccccagcttccagagcagttgtagcgcagcatgttgctccacctccaggaatagtggaaatagatagtgagaagtttgcttgtcagtggctaaatgctcattttgaagtaaatccagattgttctgtttctcgagcagaaatgtattctgaatacctctcgacttgcagtaaattagctcgtggtggaatcctaacatcaactggattttataaatgtcttagaacggtctttccaaatcatacagtgaagagagtggaggattccagtagcaatgggcaggcacatattcatgtggtaggagtaaaacggagggctataccacttcccattcagatgtactatcagcagcaaccagtttctacttctgttgttcgtgttgattctgttcctgatgtatctcctgctccttcacctgcaggaatccctcatggatcacaaaccataggaaaccattttcagaggactcctgttgccaaccaatcttcaaatctgactgcaacacaaatgtcttttcctgtacaaggtgttcatactgtggcacaaactgtttcaagaattccacaaaatccttcacctcatacccaccagcaacaaaatgctccagtgactgtcattcaaagtaaagctccaattccttgtgaagttgttaaggctacagttatccagaattccataccccagacaggagttcctgttagtattgctgttggaggaggacctccacagagttctgttgttcagaatcatagtacagggccacaacctgttacagttgtgaattctcagacattgcttcaccatccatctgtaattccacagcagtctccattacacacagtggtaccaggacagatcccttcaggcactcctgttacagtaattcaacaagctgtcccacagagtcatatgtttggcagagtacagaacataccagcatgtacttctacagtttcacagggtcaacagttaatcaccacatcaccccaacctgtgcaaacttcatctcaacagacatcagctggtagccagtcacaagatactgttatcatagcacccccacagtatgtaacaacttctgcatccaatattgtctcagcaacttcagtacagaattttcaggtagctacaggacaaatggttactattgctggtgtcccaagtccacaagcctcaagggtagggtttcagaacattgcaccaaaacctctcccttctcagcaagtttcatctacagtggtacagcagcctattcaacaaccacagcagccaacccaacaaagcgtagtgattgtaagccagccagctcaacaaggtcaaacttatgcaccagccattcaccaaattgttcttgctaatccagcagctcttccagctggtcagacagttcagctaactggacaacctaacataactccatcttcttcaccatcacctgtcccagctactaataaccaagtccctactgccatgtcgtcgtcctctacccctcaatcacagggaccacctcctactgtcagtcaaatgttatctgtgaaaaggcagcaacagcagcaacattcaccagcacccccaccacagcaggtacaagtacaagttcagcagccccaacaagtacagatgcaagttcaacctcaacagtcgaatgcaggagttggtcagcctgcctctggtgagtcgagtctgattaaacagcttctgcttccgaaacgtggtccttcaacaccaggtggtaagcttattctcccagctccacagattcctccccctaataatgcaagagctcctagccctcaggtggtctatcaggtggccagtaaccaagccgcaggttttggagtgcaggggcaaactccagctcagcagctattggttgggcagcaaaatgttcagttggtcccaagtgcaatgccaccctcagggggagtacaaactgtgcccatttcgaacttacaaatattgccaggtccactgatctcaaatagcccagcaaccattttccaagggacttctggcaaccaggtaaccataacagttgtgccaaatacgagttttgcacctgcaactgtgagtcagggaaatgcaactcagctcattgctccagcaggaattaccatgagcggaacgcagacaggagttggacttccagtacaaacgcttccagccactcaagcatctcctgctggacaatcatcatgtactactgctactcccccattcaaaggtgataaaataatttgccaaaaggaggaggaagcaaaggaagcaacaggtttacatgttcatgaacgtaaaattgaagtcatggagaacccgtcctgccgacgaggagccacaaacaccagcaatggggatacaaaggaaaatgaaatgcatgtgggaagtcttttaaatgggagaaagtacagtgactcaagtctacctccttcaaactcagggaaaattcaaagtgagactaatcagtgctcactaatcagtaatgggccatcattggaattaggtgagaatggagcatctgggaaacagaactcagaacaaatagacatgcaagatatcaaaagtgatttgagaaaaccgctagttaatggaatctgtgattttgataaaggagatggttctcatttaagcaaaaacattccaaatcataaaacttccaatcatgtaggaaatggtgagatatctccaatggaaccacaagggactttagatatcactcagcaagatactgccaaaggtgatcaactagaaagaatttctaatggacctgtattaactttgggtggttcatctgtgagcagtatacaggaggcttcaaatgcggcaacacagcaatttagtggtactgatttgcttaatggacctctagcttcaagtttgaattcagatgtgcctcagcaacgcccaagtgtagttgtctcaccacattctacaacctctgttatacagggacatcaaatcatagcagttcccgactcaggatcaaaagtatcccattctcctgccctatcatctgacgttcggtctacaaatggcacagcagaatgcaaaactgtaaagaggccagcagaggatactgatagggaaacagtcgcaggaattccaaataaagtaggagttagaattgttacaatcagtgaccccaacaatgctggctgcagcgcaacaatggttgctgtgccagcaggagcagatccaagcactgtagctaaagtagcaatagaaagtgctgttcagcaaaagcaacagcatccaccaacatatgtacagaatgtggtcccgcagaacactcctatgccaccttcaccagctgtacaagtgcagggccagcctaacagttctcagccttctccattcagtggatccagtcagcctggagatccaatgagaaaacctggacagaacttcatgtgtctgtggcagtcttgtaaaaagtggtttcagacaccctcacaggttttctaccatgcagcaactgaacatggaggaaaagatgtatatccagggcagtgtctttgggaaggttgtgagccttttcagcgacagcggttttcttttattacccacttgcaggataagcactgttcaaaggatgccctacttgcaggattaaaacaagatgaaccaggacaagcaggaagtcagaagtcttctaccaagcagccaactgtagggggcacaagctcaactcctagagcacaaaaggccattgtgaatcatcccagtgctgcacttatggctctgaggagaggatcaagaaaccttgtctttcgagattttacagatgaaaaagagggaccaataactaaacacatccgactaacagctgccttaatattaaaaaatattggtaaatattcagaatgtggtcgcagattgttaaagagacatgaaaataacttatcagtgctagccattagtaacatggaagcttcctccacccttgccaaatgcctttatgaacttaattttacagttcagagtaaggaacaagaaaaagactcagaaatgctgcagtgaaaaataattccacttacacagtgggggactcaaagtcagccacatttcacatactgttactgaagaaagcaccaagtcttaatggaacaaagaccatagaatgaattattttatctcctcccatgatgctgagaggaagcttcgtattctgatctctgagtgaatccctttgttctctgtttaaaaaaatctaaaaagaaaaaggaaaaaaaaaaaagaactgctgtgggattgtcaaccagcttatctgcaggatgtttcagatctgataaatcctgatggaaactggtatgatcagaattcagtaccatccacattggaatatacatggaatattgtaaaacctacatgagcagatgaaatagaagcattaaatatttttatctatatccaaaaaggagcacatttttatatttacaaaaccgtttaagctggtttgaataatttaaaaaagtttcagcacacctatacccccgatctcagagggggccaccaatatctagctatggatcgtgtgttttgtttagaaatcagtagcttggttttcttacttgagccaatatattttcacttatttattatcataaaaatttaccagtctgaatagatcttgtaaatatttgtgaatagaatgaatacctttcatgccactgcagccactggaaatacattctgtggtgtcctagaagcattattggtaggttctaaagttttctagactttcctgtcaattgtaagtaattgtgatatattctatgcagtggatgaatgttctttaaatttgtgtaaatacttctgcaaaggtactgatgctgtaaagtcaaaacagttttgtggaactgtgatttttttttcttttttctttttttttttctttttttttttgtattatacaccttgtagaactcattttgctggctgaaagagtatggaataatatatctcatgtcattttttagaagaaaaactatttgaaggtattttttggttttccttaacatgtatccactgtaaacgtttgtcgtgtacaagctcagagcttggacagaattttttgtatttgtaaattggtttaaatacatggaattttatacaggttttctcctgtgttatatatgcattatgtgcaggtatgatattttcttcactactttttctatcttaatatagtgtggaattttattgtattattcttccattcttaatactgtaccacattcctgctcagaaactgctcacttccttaaattgtcttttttcccccagcgtgaaatgtatccatttataactgcctattgcctgttctattagcatccaaaaatgtggaaggcctcccaaccaccatttctgctgtgtccttaggatgtgcagtaaaaaatatagacctaacagtttatgttatagaatggctttatttactttggtgactgtttatagtttttaaataaaagactgaacattttcttgagtccttcatttctgagtatgcttaagacatcttaaaaatatagagagaattctaaattcagctgaaggcaaggtataacggtcacctacctatttgattatatgttgattgataacatattaaatagagaacaaataagagaggtcctttacatgacaaatttgcatgaaataagcagattaaccaagtatttatttttcatcttgttataatgcagagcaaatgtagagaacagcaaatgattgatgcagttaaagctcaatatgcctttttttactggatactgtacatttggctaaaagcttttattgtttgatgttgtgtttcttgactgtttattcagaatcacagtgtatccaaatcttcagcttgaatttggaggcagattcttagagtgaaaaagcctcagtttccatattaaaaatgttttaaatattttgattgaattagtaccaatgtaaaatctagtttcttcctgaaggaggatccctggcgctgtcctgccatgtctcaaaggaatgtttgagaaacttcatctaatattagttataaggttgtggaatttatgcttggcccaccttccaagactggcactgcccaacagacaccgctgaaatcatgtgggtatccctaggatggccttcagagccctcaaacttacaagcacctggtagttgacatcatatggggaattttctattcaccgtacttatccaaaaatctcttttaaaaagtaaatttgtgcaacaacgtttatttgaaagataatgtcttctcaaaatcagaaactgcagtggtaattaaattaatagaaaagagaacaaactgcaggtttagaaaaatggttttcatattcaccattcttccacctcattgaattgcatgctgtagttctagcttttctgctataatatgtaaatatgactgtagccttttaagcttcagtctcagcagagaatttcctaaatgcgtttgacctaatgaaactgatcatggcttcccacttaggtttttcttcttatagctttatagaactatataataatatggacttgctgtgtaatggaattaaagtgcttttgcacaataagttctgcaaaaccctctcattcatgaaaaggtgctccttgctagacagaaacttgctgatttacagtattgttatttttgtctaaagttctgtaaatacatgctttaatgttatctttgagaaatctatgtaaataatatagtctacaacatagagactgtataattctgtgttatatatgtgcctagtgctctgttggcactcaataaattttaagtaacaaaattgataatcatatagcgaaggcatatttttcttccaagctcaagtcaggattgtgactatatattaatgagactcagtaatccaacccacacctgagaactcgtctcattactttatagtcatgtcatgtatgtttttttaaccatgaaatgacaataaaatgatttttaaaatgagaa

SEQ ID NO: 6 - DNA, 4933 bp, Homo sapiens
  source 1..4933: mol_type = genomic DNA
gcaacggcgccaagcacttccggagctgtggggacgactcttctggaggaagcagcgcgggcttgaccggcgtcggcccgccgcctccgctgccgcttcgccccaatccggtccctctggcccggcctgacccggtctggcttgttcgggctcagcggccgcgaggccgcagctcccgatggaaatcatattatgtagaatacttgggtgacatctgcctgagagatctccaagaattacagaagacaaaaatactaatgcatttgagaaagcggtagttttggggggagggggaaaaagcaactgctttcctgatctgcaacttggctggatgctaagatgtcagtggacatgaatagccaggggtctgacagcaatgaagaggactatgacccaaattgtgaggaagaggaagaagaagaagaagacgaccctggggacatagaggactattacgtgggagtagccagcgatgtggagcagcagggggctgatgcctttgatcccgaggagtaccagttcacttgcttgacctacaaggaatctgagggtgccctcaatgagcacatgaccagcttagcttctgtcctaaaggtatctcattcagttgctaaacttatattagttaatttccactggcaagtttcagagatattggacagatacaagtccaattctgctcaactgcttgttgaggctcgagttcagcctaatccatcaaaacatgttcccacatcccatccccctcaccactgtgcagtgtgtatgcagtttgtgcgaaaggaaaacctactctctctggcctgtcagcaccagttttgccgcagctgctgggagcagcactgctcagttctcgtcaaggacggcgtgggcgtgggagtctcttgcatggctcaggactgtccactccgtacaccagaggactttgtgtttccattgcttcccaatgaagaattgagagagaaatacaggcgctacctcttcagggactatgtggagagtcattaccagctccagctgtgccctggtgcagactgccccatggttattcgggtacaggagcctagagctcgccgagtacagtgcaatcggtgcaacgaggtcttctgtttcaagtgtcgtcagatgtatcacgcacccacagactgtgccacaatccggaaatggctcacgaagtgtgcagacgactctgaaacagccaactacattagtgctcacactaaagactgtcccaagtgcaacatctgcattgagaagaatggaggctgcaatcacatgcaatgctccaaatgtaaacacgacttctgctggatgtgtctaggagattggaagactcatggcagtgaatactatgagtgcagtcgttacaaggagaatcctgacatcgtgaaccagagccaacaagcccaggcgagggaagccctcaagaagtacttattctactttgagaggtgggaaaaccacaataaaagcttgcagctagaggcacagacataccagcggattcacgagaagattcaggagagggtcatgaacaatctggggacatggatcgactggcagtacctacagaatgctgccaagctcttggccaagtgtcgatacaccctgcaatacacctacccatatgcatattacatggagtccggacccaggaagaagctgtttgaataccagcaggctcagctggaggctgagatcgaaaacctctcatggaaagtggagcgtgcagacagctatgacagaggggacttggagaaccagatgcatatagcggagcagcggaggagaaccctgctgaaagatttccatgacacctaagttgggatgtggatgtgccggggtgaggaagatgtggctgcaaggtctcccggctgccatactgcatgctgcaggctctgcctttcatgaccccaggcaacagccagggccccactcctgagagacactggcaacacctcttagttgatttctgttttcttctcttttcactttttgtttctaccagggtagaggccatgttgaactggcctcttttcaggacttttatttccccctggatggttgttgggagggagggaaagtgttttctgaatggctattaatagtattagatcattacaacttatgtaactttcaaaggttgtacaattatacaaaaaaaaaaaaaaggcaaactataggataacacagagccctttttgaaaataaattggcattggagtgttttaccctctagctgttttacttagaatgtaacatatgctgcctacccacctcaaaatgtctgtactgcaagagggccctgggcctctgctttccatattcacgtttggccagagttgtagtcccaaagaagagcatgggtggcagatggtagggaattgaactggcctgtgcaatgggcatggagcacaaggggtcacagcatgcctcctgccttaccgtggcagtacggagacagtccagaacatggtcttcttgccacggggtgttgttgtctctggtggtgctgcatgtctgtggctcacctttattcttgaaactgaggtttacctggatctggctactgaggctagagcccacagcagaatggggttgggcctgtggccccccaaactagggggtgtgggttcatcacagtgttgccttttgtctcctaaagatagggatctacttttgaagggaattgttcctcccaaataaatttgctttaccttggtcctttcttttgtgccagtattcaagtggtatagctctgagcagggtcacatttggccaaacctgacactgtcttgctgcattctcctttggcaaacatcagggtcagaattcaggatagcccttcctagggcactggactttctggcatgggggctgtgtttgcacaagttattttcatgttacctggagagtgtccagaggctgctctgaggctgaggtgtgttcccccttgcctggttccagctgtcagagggataccatcctagggtctgggaatccaaggccacgagactccttggtttgtggtccgagatcctgtactaaggagggtctggccagaggaacagaccagcttttgcacaatgaagcgcaagggaacaagtggtttgcctggtgtcctacctgtcctgaacctggtcctgtgggccattgaaaagttagatctgtgatctctggggtttttgtggctttgttcaatgcttccactctagggcaggcagagcagtctatactctcccaagcctgcttgacctccaagtagagctgatacagagatctgtgaatattgtgatagaaattctttggtattcatacatttcagctgcaagtcagcaatttcccaggtaccatgtaagctataaaacagtcattcttaaagacagaggatagctgtgactcatgggatcatgaggtccatggctggttgcaggttccctttttccttcctcaggttttgtctcttcctgtgttgtccccagcaagggagagactgtggggtggattgggagaacagattaggagtatagcaaatgaacccagaatggaacagtggggagctaactgtgaatgaggagagtacctgctgcaggacctggaggtcaggtgtgaatgctgtattggcacagggaataaatatcctggcgtctggagccttcacctctccgtcaagtccttcctgtgatactgccatggcacaggatctgagttgcagctctgcaccctaaatcacaccctgggcattgtctgggctgcagggctgccaggttctgtacttgtgtccagctgtggccctggatgctggagctggagggttttctgtgctcagactgtagcctgtagctcttggcctgtgtagagccccctcctgtgccctcagtggctgtcgtttgttaacatcatcaggaagatgggaaaggtcaggcagaatttttctgccctacaaagggtggaagagaaaggacacagtattttcatgaatttaccatatatctttgtttttcttcaacgaaaaagttaattgaggcaatgtcatctgctcaaagttgagtggtttattcacaataaactgtaagtttctgattataaaaatgtgtctagagtctttcttcatggggtctaggtagtcttctgagcccacaggggtctggccagtgaacaccagaggagtgccttcctatcagtcagccccttcttccagagggctgtggaggccccagtggccaaactcggctctgttttccctttctggctgttgggggagagggcacctgtaagtgatccctgtggaatgaagtagaaaatcctgccagttttccgctctcctctccctcagtacaggctgaatcattccccaccacagatagatcccagggttgtggtagagtactgatataaatgtcccaacccccccattctgagacctccggacccctccaaagcagacatgggaatgtagggctgtggaatatggcagggtgaactccagcttcacgggagccctaagggttatgaagagacaacttggggcagaaacaagtgtggagtctaatctcaagggtgaaggacaggaaatgaggtttggattgattaagggggtccacatttgtggtgtcagaagtggcagtagtgtcagtgataagtagctcaggggtagagtggaggctccatagctgtgggcaacatgcacagggcacctgtggctagaagaggcctcatacattgccagtctgaactccgcagctcttcctctggacctcaggtgtgccaagccccacgcttggcacctgggcatacagtggtatgcaagtgattcacgtgctctagcttccaggagcttccaatccatggggaacatagaaggaattgatcactagtgaatgtttgttttttgttttgagacagtctcgctctatcgcccagactggagtac

SEQ ID NO: 7 - DNA, 7496 bp, Homo sapiens
  source 1..7496: mol_type = genomic DNA
ttttgtccgcctgccgccgccgtcccagatattaatcacggagttccagggagaaggaacttgtgaaatgggggagccggctggggttgccggcaccatggagtcaccttttagcccgggactctttcacaggctggatgaagattgggattctgctctctttgctgaactcggttatttcacagacactgatgagctgcaattggaagcagcaaatgagacgtatgaaaacaattttgataatcttgattttgatttggatttgatgccttgggagtcagacatttgggacatcaacaaccaaatctgtacagttaaagatattaaggcagaacctcagccactttctccagcctcctcaagttattcagtctcgtctcctcggtcagtggactcttattcttcaactcagcatgttcctgaggagttggatttgtcttctagttctcagatgtctcccctttccttatatggtgaaaactctaatagtctctcttcagcggagccactgaaggaagataagcctgtcactggtcctaggaacaagactgaaaatggactgactccaaagaaaaaaattcaggtgaattcaaaaccttcaattcagcccaagcctttattgcttccagcagcacccaagactcaaacaaactccagtgttccagcaaaaaccatcattattcagacagtaccaacgcttatgccattggcaaagcagcaaccaattatcagtttacaacctgcacccactaaaggccagacggttttgctgtctcagcctactgtggtacaacttcaagcacctggagttctgccctctgctcagccagtccttgctgttgctgggggagtcacacagctccctaatcacgtggtgaatgtggtaccagccccttcagcgaatagcccagtgaatggaaaactttccgtgactaaacctgtcctacaaagtaccatgagaaatgtcggttcagatattgctgtgctaaggagacagcaacgtatgataaaaaatcgagaatccgcttgtcagtctcgcaagaagaagaaagaatatatgctagggttagaggcgagattaaaggctgccctctcagaaaacgagcaactgaagaaagaaaatggaacactgaagcggcagctggatgaagttgtgtcagagaaccagaggcttaaagtccctagtccaaagcgaagagttgtctgtgtgatgatagtattggcatttataatactgaactatggacctatgagcatgttggaacaggattccaggagaatgaaccctagtgtgagccctgcaaatcaaaggaggcaccttctaggattttctgctaaagaggcacaggacacatcagatggtattatccagaaaaacagctacagatatgatcattctgtttcaaatgacaaagccctgatggtgctaactgaagaaccattgctttacattcctccacctccttgtcagcccctaattaacacaacagagtctctcaggttaaatcatgaacttcgaggatgggttcatagacatgaagtagaaaggaccaagtcaagaagaatgacaaataatcaacagaaaacccgtattcttcagggtgctctggaacagggctcaaattctcagctgatggctgttcaatacacagaaaccactagtagtatcagcaggaactcagggagtgagctacaagtgtattatgcttcacccagaagttatcaagacttttttgaagccatccgcagaaggggagacacattttatgttgtgtcatttcgaagggatcacctgctgttaccagctaccacccataacaagaccacaagaccaaaaatgtcaattgtgttaccagcaataaacataaatgagaatgtgatcaatgggcaggactacgaagtgatgatgcagattgactgtcaggtgatggacaccaggatcctccatatcaaaagttcgtcagttcctccttacctccgagatcagcagaggaatcaaaccaacaccttctttggctcccctcccgcagccacagaggcaacccacgttgtcagcaccatccctgagtcattacaatagcaccctgcagctatgctggaaaactgagcgtgggaccctgccagactgaagagcaggtgagcaaaatgctgctttctgccttggtggcaggcagagaactgtctcgtactagaattcaaggaggaaagaagaagaaataaaagaagctgctccatttttcatcatctacccatctatttggaaagcactggaattcagatgcaagagaacaatgtttcttcagtggcaaatgtagccctgcatcctccagtgttacctggtgtagatttttttttctgtacctttctaaacctctcttccctctgtgatggttttgtgtttaaacagtcatcttcttttaaataatatccacctctcctttttgccatttcacttattgattcataaagtgaattttatttaaagctatgccacacatgcatgttcaaatggtttccactgattcgatttttcattcatttaatgcaaacccattctggatattgtgcttatttgagaaaacacatttcaaaaccagaaaagccaaaaacactccaaaaacaagcaaaacaatttggagctttagataaaaggaaaaactcccagttggtaaagtttatctttacttaggatttgtggctcacacctaaacaaagggggtcagggagtgggtacaaatttgagaaaatagaagggtaagggaagggccagtggtggggtttggagagaggagatagctccattaatacacatgtttaaaagatggaaagttcacgcctgtaatcccagcactttgggaggccgaggcgggtggatcacgaggtcaggagatcaagaccatcccggctaaaacggtgaaaccccgtctctactaaaaatacaaaaaattagccgggcgtagtgacgggcgcctgtagtcccagctacttgggaggctgaggcaggagaatggcgtgaacccgggaggcggagcttgcagtgagccgagatcccgccactgcactccagcctgggcgacagagcgagactccgtctcaaaaaaaaaaaaaaaaaaaaaaaaagatggaaagttcgatgtgactgcagtatgagattaaagccacaactattgtttattttggggactctaggccaccaagtattagcacacatacttatgttttctctactaatctggtccaggtcctcatggaccacaggacaaagctttcattttcattcattcttctattgaaattataccaaattcagctgaggaatatggaagtaactttagacttaaacaagacaaaagttttttcactgaagaattgacaagtatttgctccttaaaacaacgcagattagtgaacgtggattcctgctgagggagtgcatcccataatatggcaataattttcagtttctccaacgaaaagatagtgaaggaattaaatcttttgtcctcccatggttaaaaaaaaaaaaaaagctgtgttcatttttactgtactatgcctcttttttcaccatagtagacaattatgtttcatttgatgaattcatagaactggatctcatacagcgatgtcctctctaatgttctacctttcagtttctaaagtgagtcttcctccctctcctacaaaacttttcaattttttgatgtaactcatctacaaatactgtttcttaccccagttgacttgcctttgtcagatttcttcttgttccacactatagcaatcaatttctcttcttccttacaagaaagggaacgagaaattgtagcaacctctcaaggattatatgcagctagttagttttctgcctgtgaaattaggtctggctcctaaataattttaaagaaccatcagcacttctaactctctggacaggtgcctctttgtccaagctagttaaatgctttccaaggaaatcagttcaacttttgtgagcggggaaaagcagggctttattgttgtgttacctgggagtctggagtttgaaaagtgctaattaaccttcctctttttccacattacaaacctttttaagcagcgcagcactccccttagatttggctatcctgggtgattttcagacaagaaccattttctctggggaccattcttctgctgggtgccaaggaatataaggcaaatgcccagaagaccttcaggtgactgggcagtcttatcatgggatatttcttctggccctgccccttcccattctgtaatgtgaattagccacaccagaggctgtgaccatggctagtagacagtggcaacatagtcatccccaagatgctaatcttctgctggaactgtcatacgttatcatggtcaatgtaaacctggtttgtgtggggtgattataaatagagtttccctcctctctgtgacagaatcacaggagaaggacccatctcgtggccttcttgttcttagcgcttcacttttacttcatccctcgattcccagctttttctatcatcattttgccaactcctcagatgcaagactttggttatgtcatactcaccaacgttagtccctctcttccaggtgaaaaggtgggtagcggttgggagggagtctccactgaagagcaggaaggtggtagcagggccggcagctctgccacagagctaggggtgcctgtaaggtgccgcctagagcagcctgggagctttgccttcttttgtctctcactagcccttctactctttgtcattgcctgttcttgagtggatctttgaaatgaggggacaggattctcctaagggtagagtttcaggaaatgagtgaaaggcaattgacaaatgcaaagaagtagtcactttttaaattgctggcaaagctataattaatccctaggcacaattgtagtttttattttaatgtttgtatgcacaaggccctttaggaaatgagaagttgccatgccagattaatttttttttttttttttggtgggattgccttttgggggttgcagccagaaattgtgggtaatgtgtgtatttttttatttattaaattttaaacaggattgtgcaagcttatgagacaattagataaactcatggaggaggcaggtcctcctgttattagatgattttgtgctcttggggctgacaataatacactcttgggaagtgatggtagagactgatgggaatagtctttctgcctggttgcaagtcccaaatttttaagggttaatggaagtaagtggatgtttcctcatgttaactactgaatcagatgttaggagcttgtccctttggggttgacttatgcccagcagtacagggacacagcttcattagagtgttagtgtaaactaactccaaagttaggagttaatgtgaaaggatcatccttgaaacaaatctgctgtttgccatgcttgtagtacagaaacttcacatggagttttgggtgggatttgtgttttcacaagtaaaaaatccctcacgattataaaactcagagcatcatctaatttttttttttaatgactacaagttccagcacaaaactggcatttctttgccatttcttgccagtaagaagttgacacggaggtatttgaaagcaatgttatgtgagtcattcttaagtgttccaagtaagtttagaaacagaaaaggaacttgggattcaaattgatttttcaaatcatttttaaagagacatcatcctgactaaatcttagcctgaaccttcctcccctgtgtgtattccccggtagtcaccgcagcgagatgctggtgagactgccgtggtggcatttagcatcgttaaaactggaaaactctcaagctctttgccactttcctactattttttgattcttgccattttaccaagcttaggttgtgaaacttgacagaaatgtattacaggaaaaacttataattgtatttgactttctaacacattgcaaagtttcaaagtgactttcactttcaacaacatattagaagtaaccacttttgctttcacagcctgaagagttagagcctgatctgatgccccctttcactctgaagtcatgggaaattttccagccatgaaagccctctttccactgcatactgatgggctgactcagcttccttcagccgactgagatcttttcatactattggctatttcataccaattaacctcttaaataagattgtgaattgccaaaattgatagacacttattaccacctgtggactccatattccttaccacaaatgttattttcatcagtcctgagtcattttaacttacagaaattaggattgttgctgctaatatgaataccaattataacttttagaaacaagaataaagcctaaaagagaatgaaatataagaaatgttcgttcccacccctaataacatttggaagtgaatattcccattttcttccacccacagggattgggattgatttttaatttcctaggaaacaatactagactacccaaaaagatgttgccagaatccaaaaggaactatgctcgtaaaagaaatgcagttttctcctacctaaaaaaaagaaagtaaagtgtgttctgttcttatctttttaatgactaagctttaaacagtttattttgggtaagactagaactttcggccatttgttctaatatgtgtgttattagatgcaatagaatttatgaaaagaagaatgacaaaggtatctgattagaaaatttgatcttacgcatgaatccatgtcatggccagccactgtcacatagtgggtgccattctcaacatattggtttgctaactttaagcattagggatttagcacactaaaatacttttaattatattaggtttggtaactaaggagtaaataaatcataatttatcatttgccaaggccaacaaacaacactattgtgctgtttgctctcaatgaagttgaataaaccaggaggcttggcatatcccctttatgttaatcccagctagagattagtaggttgactttcacagcaattgtatattgatccattttaactcatccttgccataatttccaggccagtcaccaggacagaggagatgatggggaaacagagctttagatgaaaactactatgcactactagccttagaggcactggtttcctgttaccactttggcaagtatggatggtctaagtccagtagggcttcatccatggagccattagaactgaggggggagtgttagagatgccatttcaccaggatctttttgctcaggttgtacccatgccaattgaagaacgtgttaaagatgaggaggagagatgtaccattctctcccttaataatgatgttggtttgcaaaacctaaagaaataataacaacagactatttcatactttcaagcaagtctttatactacctgttatttctctaaaattcaaataaagaatttttaaactta

SEQ ID NO: 8 - DNA, 980 bp, Homo sapiens
  source 1..980: mol_type = genomic DNA
ggggcagacgtgggacgggaaggacggctgccgggactggcgcgcggggacactgggccgacgcgtggagtagcggggagagcgggaagcctgagggggcggggccggcgcgaggccgtgggtgcggcacgaggatgccggcggcgggacagcgcccgtaggcagccccacgggcagggcgcgcgggcggggcggggcgggccgggccagaggagcgcccggcatgtcgcaagggctcccggccgccggcagcgtcctgcagaggagcgtcgcggcgcccgggaaccagccgcagccgcagccgcagcagcagagccctgaggatgatgacaggaaggtccgaaggagagaaaaaaaccgagttgctgctcagagaagtcggaagaagcagacccagaaggctgacaagctccatgaggaatatgagagcctggagcaagaaaacaccatgctgcggagagagatcgggaagctgacagaggagctgaagcacctgacagaggcactgaaggagcacgagaagatgtgcccgctgctgctctgccctatgaactttgtgccagtgcctccccggccggaccctgtggccggctgcttgccccgatgaagccggggacactcctctgcccagcaaggagccttggtcattttcatacctgggaggaaggcttttccttcacaattgtatacagggggcacctgtggccaggcctcctcctgggagctccaggaccagccagctgtgttccctgcagactgggctcagcccgacatccaacaggcgccaaactcacagagcccttgtgcagatccagcatggaggccaccctcaggagtgacttctcatccaccctggcagctagtaggttctgctgttatgcagagccatttcctctagaatttggataataaagatgcttattgtctctcccttctccagttctgggaatttacaggcacaatacacttccttttcctgg

SEQ ID NO: 9 - DNA, 3569 bp, Homo sapiens
  source 1..3569: mol_type = genomic DNA
ataccatcgtcttgggcccggggagggagagccaccttcaggcccctcgagcctcgaaccggaacctccaaatccgagacgctctgcttatgaggacctcgaaatatgccggccagtgaaaaaatcttgtggctttgagggcttttggttggccaggggcagtaaaaatctcggagagctgacaccaagtcctcccctgccacgtagcagtggtaaagtccgaagctcaaattccgagaattgagctctgttgattcttagaactggggttcttagaagtggtgatgcaagaagtttctaggaaaggccggacaccaggttttgagcaaaattttggactgtgaagcaaggcattggtgaagacaaaatggcctcgccggctgacagctgtatccagttcacccgccatgccagtgatgttcttctcaaccttaatcgtctccggagtcgagacatcttgactgatgttgtcattgttgtgagccgtgagcagtttagagcccataaaacggtcctcatggcctgcagtggcctgttctatagcatctttacagaccagttgaaatgcaaccttagtgtgatcaatctagatcctgagatcaaccctgagggattctgcatcctcctggacttcatgtacacatctcggctcaatttgcgggagggcaacatcatggctgtgatggccacggctatgtacctgcagatggagcatgttgtggacacttgccggaagtttattaaggccagtgaagcagagatggtttctgccatcaagcctcctcgtgaagagttcctcaacagccggatgctgatgccccaagacatcatggcctatcggggtcgtgaggtggtggagaacaacctgccactgaggagcgcccctgggtgtgagagcagagcctttgcccccagcctgtacagtggcctgtccacaccgccagcctcttattccatgtacagccacctccctgtcagcagcctcctcttctccgatgaggagtttcgggatgtccggatgcctgtggccaaccccttccccaaggagcgggcactcccatgtgatagtgccaggccagtccctggtgagtacagccggccgactttggaggtgtcccccaatgtgtgccacagcaatatctattcacccaaggaaacaatcccagaagaggcacgaagtgatatgcactacagtgtggctgagggcctcaaacctgctgccccctcagcccgaaatgccccctacttcccttgtgacaaggccagcaaagaagaagagagaccctcctcggaagatgagattgccctgcatttcgagccccccaatgcacccctgaaccggaagggtctggttagtccacagagcccccagaaatctgactgccagcccaactcgcccacagagtcctgcagcagtaagaatgcctgcatcctccaggcttctggctcccctccagccaagagccccactgaccccaaagcctgcaactggaagaaatacaagttcatcgtgctcaacagcctcaaccagaatgccaaaccagaggggcctgagcaggctgagctgggccgcctttccccacgagcctacacggccccacctgcctgccagccacccatggagcctgagaaccttgacctccagtccccaaccaagctgagtgccagcggggaggactccaccatcccacaagccagccggctcaataacatcgttaacaggtccatgacgggctctccccgcagcagcagcgagagccactcaccactctacatgcaccccccgaagtgcacgtcctgcggctctcagtccccacagcatgcagagatgtgcctccacaccgctggccccacgttccctgaggagatgggagagacccagtctgagtactcagattctagctgtgagaacggggccttcttctgcaatgagtgtgactgccgcttctctgaggaggcctcactcaagaggcacacgctgcagacccacagtgacaaaccctacaagtgtgaccgctgccaggcctccttccgctacaagggcaacctcgccagccacaagaccgtccataccggtgagaaaccctatcgttgcaacatctgtggggcccagttcaaccggccagccaacctgaaaacccacactcgaattcactctggagagaagccctacaaatgcgaaacctgcggagccagatttgtacaggtggcccacctccgtgcccatgtgcttatccacactggtgagaagccctatccctgtgaaatctgtggcacccgtttccggcaccttcagactctgaagagccacctgcgaatccacacaggagagaaaccttaccattgtgagaagtgtaacctgcatttccgtcacaaaagccagctgcgacttcacttgcgccagaagcatggcgccatcaccaacaccaaggtgcaataccgcgtgtcagccactgacctgcctccggagctccccaaagcctgctgaagcatggagtgttgatgctttcgtctccagccccttctcagaatctacccaaaggatactgtaacactttacaatgttcatcccatgatgtagtgcctctttcatccactagtgcaaatcatagctgggggttgggggtggtgggggtcggggcctgggggactgggagccgcagcagctccccctcccccactgccataaaacattaagaaaatcatattgcttcttctcctatgtgtaaggtgaaccatgtcagcaaaaagcaaaatcattttatatgtcaaagcaggggagtatgcaaaagttctgacttgactttagtctgcaaaatgaggaatgtatatgttttgtgggaacagatgtttcttttgtatgtaaatgtgcattcttttaaaagacaagacttcagtatgttgtcaaagagagggctttaatttttttaaccaaaggtgaaggaatatatggcagagttgtaaatatataaatatatatatatataaaataaatatatataaacctaaaaaagatatattaaaaatataaaactgcgttaaaggctcgattttgtatctgcaggcagacacggatctgagaatctttattgagaaagagcacttaagagaatattttaagtattgcatctgtataagtaagaaaatattttgtctaaaatgcctcagtgtatttgtatttttttgcaagtgaaggtttacaatttacaaagtgtgtattaaaaaaaacaaaaagaacaaaaaaatctgcagaaggaaaaatgtgtaattttgttctagttttcagtttgtatatacccgtacaacgtgtcctcacggtgccttttttcacggaagttttcaatgatgggcgagcgtgcaccatccctttttgaagtgtaggcagacacagggacttgaagttgttactaactaaactctctttgggaatgtttgtctcatcccattctgcgtcatgcttgtgttataactactccggagacagggtttggctgtgtctaaactgcattaccgcgttgtaaaatatagctgtacaaatataagaataaaatgttgaaaagtcaaactgg

SEQ ID NO: 10 - DNA, 3213 bp, Homo sapiens
  source 1..3213: mol_type = genomic DNA
gtctttctgttcactttttttcacaaaatcatccaggctcttcctactctcctctcttaccacctctctcttcttttttttttttttttagttatttcacagatgccactggggtaggtaaactgacccaactctgcagcactcagaagacgaagcaaagccttctacttgagcagtttttccatcactgatatgtgcaggaaatgaagacattgcctgccatgcttggaactgggaaattattttgggtcttcttcttaatcccatatctggacatctggaacatccatgggaaagaatcatgtgatgtacagctttatataaagagacaatctgaacactccatcttagcaggagatccctttgaactagaatgccctgtgaaatactgtgctaacaggcctcatgtgacttggtgcaagctcaatggaacaacatgtgtaaaacttgaagatagacaaacaagttggaaggaagagaagaacatttcatttttcattctacattttgaaccagtgcttcctaatgacaatgggtcataccgctgttctgcaaattttcagtctaatctcattgaaagccactcaacaactctttatgtgacagatgtaaaaagtgcctcagaacgaccctccaaggacgaaatggcaagcagaccctggctcctgtatcgtttacttcctttggggggattgcctctactcatcactacctgtttctgcctgttctgctgcctgagaaggcaccaaggaaagcaaaatgaactctctgacacagcaggaagggaaattaacctggttgatgctcaccttaagagtgagcaaacagaagcaagcaccaggcaaaattcccaagtactgctatcagaaactggaatttatgataatgaccctgacctttgtttcaggatgcaggaagggtctgaagtttattctaatccatgcctggaagaaaacaaaccaggcattgtttatgcttccctgaaccattctgtcattggaccgaactcaagactggcaagaaatgtaaaagaagcaccaacagaatatgcatccatatgtgtgaggagttaagtctgtttctgactccaacagggaccattgaatgatcagcatgttgacatcattgtctgggctcaacaggatgtcaaataatatttctcaatttgagaatttttactttagaaatgttcatgttagtgcttgggtcttaagggtccataggataaatgattaaaatttctctcagaaacttatttgggagctttttatattatagccttgaataacaaaatctctccaaaactggttgacatcatgagtagcagaatagtagaacgtttaaacttagctacattttacccaatatacaaactcgatcttgcctttgaagctattggaaagacttgtagggaaaagaggtttgtgttacctgcatcagttcactacacactcttgaaaacaaaatgtcccaatttgactaaccaaccataaatacagtaatgattgtatatttcaagtcagtcttccaaaataagaaatttttgctgtgtcagtctaagaatggtgtttcttaaatgcaaaggagaaatcattttaggcttgatgtaagaaaatgaaaataataaatggtgcaataaaaatatagaatataccaattggatatagggtagatgttccacatacctggcaaacaaatgcttatatctactctgttagattgataagcaaatataggtattaatggagcagtcaacgtatagcacatttatgaggaaagtagagactcactgggtcacatagactaatggataggaatgtgacataatgctgctgaattaatatacttatgggcatctgaatagtttaaaagttagtcagaataggtatcactgggcaagtgaagatagcttaaactgcttcatgcttgacttgatagcaagttaaagtgcaattaatggaatggaggaaaacccagaatatttaattggtctgtaggggtcaatttgctttcattcaccacatctgcatcttgctgttcttcttactaaggaatcagggcaaatcatctgtagtgacatattttagtttgctaatcatttattttaaaatactgaggttgcagccacttaagagtatagcaaaagatggattcagatttttggactttccaaagtacttgagttaaactatttcaaaaatagcctataattttattcaacagtttgaggctattcgaattctcaggtgctgctactgaataatgtaatagtcttcatacaaagtggatagcaaaggttaaaatccatttcaacaaatatgtgagctgagctgctgcacaaaggaatgtgatgtgtgtgtgtgtgtgtgtgtgtgtgtgtgttaggtggggtgggtgacaacagaaatggtgcacgagaaactgatcaaattgacattatattttcagtttgcttatgaagctcaaaatactagagtaaatgggtcattaaagaaaataatatgtgaaattatggagtttagaatacaagtggggtatatatacaaaaagacaaaactgaggttttgtggtggagagattttcttaagtaacactggcattaagttttagctccttagatttgggggtgcaaatattcttttgagtcactgttattttgccaattacacctagaatttcaagcaaccaattcgagataggctgttttagccaggctgcatttgtggacaacttatgtaagaaagacatgttagaatagctgcttgtggtattcttaaaaatagaaacaggaaatatggggaggatacatttagctgtcctcttatcagatgaacacacgaaattgaacagttccttcatgattctctcaaacttaaaagcaaaatatttctgtcttatttaaaatatccttagtatgtcttatagtaaagataatgctgataatgatttcatctctaagatgtattaatatatttgtactgtttgccaaaatcacaaatcatttatgtttttattccttttcaaaatggtgtcagagacatacatgcattttcccaaatgactctacttcactattatttacatggcttatttcattagtttatagagggtttgagaaaaagaatatgtagataatttaatggtttttcacaaattttaagcttgtgattgtgctcaatgagaaggtaaagttattaaaacttatttgaaatc

SEQ ID NO: 11 - DNA, 2559 bp, Homo sapiens
  source 1..2559: mol_type = genomic DNA
cataagcagctttatgggtcctgaaagccaagggtgcccaggggtgtggtgtctctgagccctgttatccctcccccatgaccacagagcaggcaagggggcagcagggcccaaatctggccattggccgtcagaagccccctgcgggggttgtgactcccaagagtgatgcagaggagcccccgttgaccaggaagaggagcaagaaggagagggggctccgagggtctcgaaagcgcactggcagctctggggagcagacaggccccgaggccccggggagcagcaataaccctcccagcactggagaggggccggcgggcgcaccccctgcatcccctgggccggcctcttctcgccagtcccaccgacatcgtcctgactccctgcacgacgctgctcagaggacatacgggcccctgctcaatcgagtcttcgggaaggaccgcgaactgggccccgaggagctagacgagcttcaggccgccttcgaggagtttgacactgaccgtgacggctacatcagccaccgggagctgggtgactgcatgcggaccctgggctacatgcccaccgagatggagctcctggaggtctcgcagcacatcaagatgcgcatgggcggccgtgtggactttgaggagtttgtagaactgataggcccaaagctgagggaggagacggcgcacatgctgggggtgcgagagctgcgcatcgccttccgagagtttgacagggacagggatggacgaattacggtggcggagctgcgggaggcggtaccggctctgctcggggagccgctggcgggtcctgagctggacgagatgctccgagaagtggacctcaatggggatggcaccgtagactttgacgagtttgtgatgatgctctcccgccactgaggctccaggagggaatatctgttgcccctgcggccccagacaccagccagacccaggctgcaggcctcccccaggagcctccaggatggagatggagacccagcagcccccagactacttctatccctgaaaacacctggcctcaatgttggcttgttatgttacctgcccaccctcatccttacctcctcctactcaagctgcctggagaagacctgctctcagctgcccaccgttcctcagtgtgagcaagatttgggtctctccagacctctgggaggtagggagttccctggcactggcagcattcagtggggaccccccagtggcatgatgaatggagaggatggctggaccccttccactacttatgtttataattttttttttttttaatgaacttgagccgggtgcagtggctcacacctgtaagcccagctgtcagggggcagaagcgggaggatagcttgagcccaggagtgcaagacctgcctgggcaatatactgagaccccattctccacaaaaaggaaaaataaaagacaaaaaaacaaacaaaaaaccaaaaaacccaagtgtaaaaaaagtgagcttgaaagaaagaaagggatggctccatgtatcaaagacaaagaaatcaaagctggggttgtaagagggagctgacgctgtgggggtttcagatctggatggaggcttggccgcctggactcctacaaccatgagtgacagaagaaccatatgagtctggggagcaagaaacaaaccccccggatatattccagggtctccaaaggctaagatattaatctgtctgcactgaccagtcatagaaagtggcaaggatacagatgttcagggcccagagtggaaacagctgccctaaagagcctggaactccagggcctgcccttcaagcaggcgtgtagtctctctccagggtgtgaaaaactggaaaaaaaccctgccgctcccaaaggggaacttgtgataaaaattacagattattgggctgggagtggtggctcacgcctgtaatcccagcactttgggaggctgaggcgggtgaattacctgaggtcaggagtttgaggccagcctgaccaacatggtgaaaccccatctctactaaaaatacaaaaattaactgggcgaggtagcatgcacctgtaatctcagctactcggaggttgaggcaggagaatcgcttgagcccgggaggtggagctgcagtgagctgagatcacaccattgcaccccagcctgagcaacagatcgagactccgtctcaaaaacaaaacaaaaaaaccatactgattataaaagtaaagaaaccaccatgaaggagacgagacagagacaaaaacaagaggactggcatctcagtgtacataatacagccgcctaagagaccacaagatacatgcaaataaaagacggctaaaaggggaagagagatcaacatgcagtaacaggatagtatgaagagagaaccggaagatttaaaaagtaacccaacaggccaggcgcatggctcatgcctggaatcccagcactttgggaggccaaggtgggtgggttgcttgagctcaggaattcgagaccagcctgggcaacatggtgaaaccctgtctctactaaaaatacaaaaatta

SEQ ID NO: 12 - DNA, 6780 bp, Homo sapiens
  source 1..6780: mol_type = genomic DNA
ctgggtcctgtgtgtgccacaggggtggggtgtccagcgagcggtctcctcctcctgctagtgctgctgcggcgtcccgcggcctccccgagtcgggcgggaggggagagcgggtgtggatttgtcttgacggtaattgttgcgtttccacgtctcggaggcctgcgcgctgggttgctccttcttcgggagcgagctgttctcagcgatcccactcccagccggggctccccacacacactgggctgcgtgcgtgtggagtgggacccgcgcacacgcgtgtctctggacagctacggcgccgaaagaactaaaattccagatggcaaactcaatgaatggcagaaaccctggtggtcgaggaggaaatccccgaaaaggtcgaattttgggtattattgatgctattcaggatgcagttggaccccctaagcaagctgccgcagatcgcaggaccgtggagaagacttggaagctcatggacaaagtggtaagactgtgccaaaatcccaaacttcagttgaaaaatagcccaccatatatacttgatattttgcctgatacatatcagcatttacgacttatattgagtaaatatgatgacaaccagaaacttgcccaactcagtgagaatgagtactttaaaatctacattgatagccttatgaaaaagtcaaaacgggcaataagactctttaaagaaggcaaggagagaatgtatgaagaacagtcacaggacagacgaaatctcacaaaactgtcccttatcttcagtcacatgctggcagaaatcaaagcaatctttcccaatggtcaattccagggagataactttcgtatcacaaaagcagatgctgctgaattctggagaaagttttttggagacaaaactatcgtaccatggaaagtattcagacagtgccttcatgaggtccaccagattagctctggcctggaagcaatggctctaaaatcaacaattgatttaacttgcaatgattacatttcagtttttgaatttgatatttttaccaggctgtttcagccttggggctctattttgcggaattggaatttcttagctgtgacacatccaggttacatggcatttctcacatatgatgaagttaaagcacgactacagaaatatagcaccaaacccggaagctatattttccggttaagttgcactcgattgggacagtgggccattggctatgtgactggggatgggaatatcttacagaccatacctcataacaagcccttatttcaagccctgattgatggcagcagggaaggattttatctttatcctgatgggaggagttataatcctgatttaactggattatgtgaacctacacctcatgaccatataaaagttacacaggaacaatatgaattatattgtgaaatgggctccacttttcagctctgtaagatttgtgcagagaatgacaaagatgtcaagattgagccttgtgggcatttgatgtgcacctcttgccttacggcatggcaggagtcggatggtcagggctgccctttctgtcgttgtgaaataaaaggaactgagcccataatcgtggacccctttgatccaagagatgaaggctccaggtgttgcagcatcattgacccctttggcatgccgatgctagacttggacgacgatgatgatcgtgaggagtccttgatgatgaatcggttggcaaacgtccgaaagtgcactgacaggcagaactcaccagtcacatcaccaggatcctctccccttgcccagagaagaaagccacagcctgacccactccagatcccacatctaagcctgccacccgtgcctcctcgcctggatctaattcagaaaggcatagttagatctccctgtggcagcccaacgggttcaccaaagtcttctccttgcatggtgagaaaacaagataaaccactcccagcaccacctcctcccttaagagatcctcctccaccgccacctgaaagacctccaccaatcccaccagacaatagactgagtagacacatccatcatgtggaaagcgtgccttccagagacccgccaatgcctcttgaagcatggtgccctcgggatgtgtttgggactaatcagcttgtgggatgtcgactcctaggggagggctctccaaaacctggaatcacagcgagttcaaatgtcaatggaaggcacagtagagtgggctctgacccagtgcttatgcggaaacacagacgccatgatttgcctttagaaggagctaaggtcttttccaatggtcaccttggaagtgaagaatatgatgttcctccccggctttctcctcctcctccagttaccaccctcctccctagcataaagtgtactggtccgttagcaaattctctttcagagaaaacaagagacccagtagaggaagatgatgatgaatacaagattccttcatcccaccctgtttccctgaattcacaaccatctcattgtcataatgtaaaacctcctgttcggtcttgtgataatggtcactgtatgctgaatggaacacatggtccatcttcagagaagaaatcaaacatccctgacttaagcatatatttaaagggagatgtttttgattcagcctctgatcccgtgccattaccacctgccaggcctccaactcgggacaatccaaagcatggttcttcactcaacaggacgccctctgattatgatcttctcatccctccattaggtgaagatgcttttgatgccctccctccatctctcccacctcccccacctcctgcaaggcatagtctcattgaacattcaaaacctcctggctccagtagccggccatcctcaggacaggatctttttcttcttccttcagatccctttgttgatctagcaagtggccaagttcctttgcctcctgctagaaggttaccaggtgaaaatgtcaaaactaacagaacatcacaggactatgatcagcttccttcatgttcagatggttcacaggcaccagccagaccccctaaaccacgaccgcgcaggactgcaccagaaattcaccacagaaaaccccatgggcctgaggcggcattggaaaatgtcgatgcaaaaattgcaaaactcatgggagagggttatgcctttgaagaggtgaagagagccttagagatagcccagaataatgtcgaagttgcccggagcatcctccgagaatttgccttccctcctccagtatccccacgtctaaatctatagcagccagaactgtagacaccaaaatggaaagcaatcgatgtattccaagagtgtggaaataaagagaactgagatggaattcaagagagaagtgtctcctcctcgtgtagcagcttgagaagaggcttgggagtgcagcttctcaaaggagaccgatgcttgctcaggatgtcgacagctgtggcttccttgtttttgctagccatatttttaaatcagggttgaactgacaaaaataatttaaagacgtttacttcccttgaactttgaacctgtgaaatgctttaccttgtttacagtttggcaaagttgcagtttgttcttgtttttagtttagttttgttttggtgttttgatacctgtactgtgttcttcacagaccctttgtagcgtggtcaggtctgctgtaacatttcccaccaactctcttgctgtccacatcaacagctaaatcatttattcatatggatctctaccatccccatgccttgcccaggtccagttccatttctctcattcacaagatgctttgaaggttctgattttcaactgatcaaactaatgcaaaaaaaaaaaagtatgtattcttcactactgagtttcttctttggaaaccatcactattgagagatgggaaaaacctgaatgtataaagcatttatttgtcaataaactgccttttgtaaggggttttcacataacatagaggagcttcccttttttgtttaagttttgtaacctttaatcctccatattctcatgtctgtcatcccaggggtgtcacaactgtaaaaatctacaatattagaaagcagctactacagatgtggaagagagaacacttgtataagacaatgctgtactgaagttatataacaaggtcccctgatacttatgcctgcattactttgagggatgctgaatgagaggaccatctccctgaaatatattaataattttcagataaaattatgaacataacataccttttctcaagtggaattagagttcatttcccatttaagtgattacactctatctcctaagagctgtgggaaccagttcatattgcagtggaaacattaactcttcgttgcactgttgagtgtcaaggctactgtggcaatgttttttgcaaagttctcagtaattttctctctgcaatcaaattagagttcatatttaatttgcagattctctcattcattgctccacactgctttatcaaatcaggtgaaagaaattaatgtagttttgcctattttacaaaatggtggttggttctttaaacaccatgttattactcttaataaatctacaaatatttattgagcatctatgatatgcttggtgctgttaggcactgtgtttttaaagcacaaactctcaaaagctgattccagcgtaatgttttatttttgtttttctgtgttttttatgacaaagtctgtctgatagacaaagcctggaaggtttcccccagggctttagaatttagaattagctggttttcatttcaaatgggaaattaatggagaaatgagataaaatcatctctgtgtaaatgcttgaacccacagaaagttttctaaatatggactaattgtgggtttgtgcatatttctgtgtctcctcttttcacttcacacccaccatgatataaaaagatgcatcagagagtgagcctgccttcaggacctgaaaggacatgactgaacatctagtagatctggtggaaattaatgttatacaaaagacacgtagactaagttgaccctgggagaggagttaatacattcctttgcaaagtgacatgtgccctttttttgacagtctggctttcatggtatgagatgaggactcacaggccttgggtaatttctgcttttgtatgaattttttcagatggttctgagctggttatgtccctggaggggaatttttcatttgccttagatgttcttcccatgagtaggtacatgagtgaagtttcttacacttttaaaattgcattggcaaattttcttttgctttatgaacccctgttttgtcattatgatttttcacttgttttaacagtttcagatgtcaccttggaatagcactgtttattttggcctttttatgattgctgatgataggtacagtctaaaggccaaaagttgccacttcattgtgataacattgttgcaacattcctaatatattagagaatgatgtaaaataagaatgttagagaacatagcacattctcattcagtttataaacaatatttgaaaatttccagtgagaattaaaaaaggactagtgatgatatagcaaacctggacctgaaatttgggggtggggggtggggggatatctgttttgcagagaaaatttaccagcctccagcaaaatctctgcatcttgtactcaatagcaaccattagtattgtcatttaaaaagaatgaatcaaaaattcatacgtaatggaatgaaaagaggaaaactttctattaaacactgtcaagaaagacccattgctatctatcacctatgaaattaaacctaaaaaaatttttttttattgtaaaagcgactgctcgttgatgtctggaagtgatccagactttgtttcactgtgatccaaaaagttagacattccttccatttctcaagatttggtaacaatttttttttaagtcagcatttcatataatacataaaattaagacaaattaacttactgatatgtggccaatatcaacccttctcacccaacccaaacatgttctggagatagaaggacttatcctcaattatattccagtaaatttatctccataatctgttttatcccctaatgtatgatatatctcaccaaatttttctagaattgaataaaagcagtttttgcttaacttgaatttccttccacaaatacaaccttcagctcttccctctctgtttcccttttgcccacattgcaaatagtcttcataatagaaccctcactgcaacttaaaagggtcccatttcttaactcagcatttcatataccaagaacacttgcaaagatttcttcataatgtgattttttaatttttcagttccagaagcatttcctacagttcgaacgttattttttctctcagattttcaacttgaagctttgatttgcactgaattaacttggataaaattttagtttctctcttcagctaacagatttggaagcaaattacagtatacttgaataattcaggtactacctgttgacctggaattttagtgattctgggaaagttttccagacaaagacaccaatagagtgaagggttttttccccaattactattttattgttttttaaaatgcctttttaaaacttgtgtgatgtggcaaaatagtcatatgttcaattaatttatattttattcattccttttcaattctggttattatgtaacctcaagtactttatctgttcttttaaagtattttataaaatgaacgttaactaaa

SEQ ID NO: 13 - DNA, 3388 bp, Homo sapiens
  source 1..3388: mol_type = genomic DNA
aacaagatgcaaggacaatctgaggactgagagccatttcaacgtgagcccccagtctgagaacaagaaagaagaacttctgtctcgagactgaagccaaggataccagcagagccaacatttgcttcaagttcctgggcctgctgacagcgtgcaggatgctgttggaacccggcagaggctgctgtgccctggccatcctgctggcaattgtggacatccagtctggtgagacagggaactacacagtgacgggattgaaacaaagacaacaccttgagttcagccataatgaaggcactctcagttcaggcttcctacaagaaaaggtctgggtaatgctggtcaccagccttgtggcccttcaaggtatgtccaaaagagccgtaagcaccccaagcaatgagggtgctattatatttctgccaccttggttattctccaggaggagaaggttggaaaggatgtccagggggagagaaaaatgttactcaagccctggctatccacaggaaagttcaaaccagtttcactgatccaaaggcactaaggaggaagacagataaatcagacttttcaatgggtaggaggtaagactcattaggaatgaaggcctgtgagagaggcaagttagtacaactacctctactcactgcatgaacagagggctacaagttgaagcaacagattttcagctattagaggaagaaaaggcaagagacagacttggtttggagatgggttttgaacaatgcggctcctcagcaaaggctgatggccagattgagtatattaaacacatgtagctgagtcctctgaaaaccatttaccaatatagattagcgttttccctattagataacaaaaagtgaaacttccaataatttgtcataacgtttttgcataacaagcaactgattcaggtttttgcctggccttggcattcttaactccattttatttaggcattcctcaaatcaataactaccactgttttgaatggcatcagaatgtaagctctatatatatgtaaggactttgtcttctttaccccaacgaaaagtcccacacatatggcaggctcttaataaatttgttaaaaaacctgtatgatgaatcagatgctttacacatgatgattctaaccttatacaacccttgcaagcaaacatcccctggttactcatcaggaaacagacacaaggaagttaaatagggcctggtgcggtggctcacgcctgtaatcccagcactttgggaggccaaggcaggcagatcctttgagcctaggagtttgaggccagtctgggcaacatggcaaaaccccaactatacaaaaaaatacaaaaattaggcatggtggcacacaactgtagtcccaagctaaggcatgaggatcacctgagcccaggctggttgaggttgcagtgagccatgatcatgccactgtactccagcctgggtgacagggtgagacactttctcaaaggaaaaaaaaaaaaaaaaagagttaattgttgcccgtcacagcaattaatacagatccttctcactctaaaaccttacactcagtaatgatctactatatgcaaagcacctcttacatccttcaccaccccattcattctgagattgactcctcccctttccagaaacaggaccacctaaacattccctattccagtcccttatttgcaagtcatcaaaagaaaacagagatttcaaaaagaaaacagagaccttatctgtaatccttggtaaggatcttccaaatttaagcctatgccagttttcaggaggaaacatgaatatgaaacagtctgacctttagacataattttttgttgactttaaattcccttggttaggccactgtaaccagtaaaataaattttattttagaataaaaattataaaggggaaattgagtctagccatacaacctactactagttactatctttgattcccaagtcatcctagagcaaaaaaaaaaaaaaaaaaatcatctctggcctttttttccttttccactcaggtgaagagaatgagcttttgaatccaattttttgttttctcctatattcaattcaagtagctttaaagttaaccaaaggaaaaaaccaaagctcaatatttgattaaacgagaaaatatacactacttagaagctttcttttctttatccttcttccccaactcaaggcttagtagaattattgaaagaggtagtattcagtagaatagtacacatgctttttcaggtccagaaacaccacataggtcaagttatcatgcttacatgtggggaaaaggaggagggagtttcctggacctctgtgcctctctcagctcatgaactagtttcagtgaatatccttgtcttaccactgtgccaacaattcagagctatacgtggaaaacctaccttcaactttttgagtggcatctattgcttctttgattgttccttccagcaaggagcgatcaaaggctagcccccttcccactcccaccagaatcagatttgctcaagattacaaccctaatttagtaataagatgcaatacataaaatagttcccactttccttttccaatccctttacagtcatgagggcctatcacgcacgcatctcaggacaggtgagacttcattatatcaggtattttgttgctattctaagttataaggcagtaatacaaactttctttccacagctttgtaagccttgtgccaaaagaaacttttaaaacagctacagcaagatgagtctgactatggcttagtatctttctcattacaataggcacagagaagaatgcaacagggcacaggggaagagatgctaaatataccaagaatctgtggaaatataagctggggcaaatcagtgtaatccttgactttgctcctcaccatcagggcaaacttgccttcttccctcctaagctccagtaaataaacagaacagctttcaccaaagtgggtagtatagtcctcaaatatcggataaatatatgcgtttttgtaccccagaaaaacttttcctccctcttcatcaacatagtaaaataagtcaaacaaaatgagaacaccaaattttgggggaataaatttttatttaacactgcaaaggaaagagagagaaaacaagcaaagataggtaggacagaaaggaagacagccagatccagtgattgacttggcatgaaaatgagaaaatgcagacagacctcaacattcaacaacatccatacagcactgctggaggaagaggaagatttgtgcagaccaagagcaccacagactacaactgcccagcttcatctaaatacttgttaacctctttggtcatttctctttttaaataaatgcccatagcagt

SEQ ID NO: 14 - DNA, 1609 bp, Homo sapiens
  source 1..1609: mol_type = genomic DNA
gtaaagagaggcacgtggttaagctctcggggtgtggactccaccagtctcacttcagttccttttgcatgaagagctcagaatcaaaagaggaaaccaacccctaagatgagctttccatgtaaatttgtagccagcttccttctgattttcaatgtttcttccaaaggtgcagtctccaaagagattacgaatgccttggaaacctggggtgccttgggtcaggacatcaacttggacattcctagttttcaaatgagtgatgatattgacgatataaaatgggaaaaaacttcagacaagaaaaagattgcacaattcagaaaagagaaagagactttcaaggaaaaagatacatataagctatttaaaaatggaactctgaaaattaagcatctgaagaccgatgatcaggatatctacaaggtatcaatatatgatacaaaaggaaaaaatgtgttggaaaaaatatttgatttgaagattcaagagagggtctcaaaaccaaagatctcctggacttgtatcaacacaaccctgacctgtgaggtaatgaatggaactgaccccgaattaaacctgtatcaagatgggaaacatctaaaactttctcagagggtcatcacacacaagtggaccaccagcctgagtgcaaaattcaagtgcacagcagggaacaaagtcagcaaggaatccagtgtcgagcctgtcagctgtccagagaaaggtctggacatctatctcatcattggcatatgtggaggaggcagcctcttgatggtctttgtggcactgctcgttttctatatcaccaaaaggaaaaaacagaggagtcggagaaatgatgaggagctggagacaagagcccacagagtagctactgaagaaaggggccggaagccccaccaaattccagcttcaacccctcagaatccagcaacttcccaacatcctcctccaccacctggtcatcgttcccaggcacctagtcatcgtcccccgcctcctggacaccgtgttcagcaccagcctcagaagaggcctcctgctccgtcgggcacacaagttcaccagcagaaaggcccgcccctccccagacctcgagttcagccaaaacctccccatggggcagcagaaaactcattgtccccttcctctaattaaaaaagatagaaactgtctttttcaataaaaagcactgtggatttctgccctcctgatgtgcatatccgtacttccatgaggtgttttctgtgtgcagaacattgtcacctcctgaggctgtgggccacagccacctctgcatcttcgaactcagccatgtggtcaacatctggagtttttggtctcctcagagagctccatcacaccagtaaggagaagcaatataagtgtgattgcaagaatggtagaggaccgagcacagaaatcttagagatttcttgtcccctctcaggtcatgtgtagatgcgataaatcaagtgattggtgtgcctgggtctcactacaagcagcctatctgcttaagagactctggagtttcttatgtgccctggtggacacttgcccaccatcctgtgagtaaaagtgaaataaaagctttgactag

SEQ ID NO: 15 - DNA, 2463 bp, Homo sapiens
  source 1..2463: mol_type = genomic DNA
ggccttgtcagctcacagcaggcgttaacagcctctaattgaggaaactgtggctggacaggttgcaaggcagttctgctccccatcgtcctcttgctgactggggactgctgagcccgtgcacggcagagagtctggtggggtggaggggctggcctggcccctctgtcctgtggaaatgctggggcaagtggtcaccctcatactcctcctgctcctcaaggtgtatcagggcaaaggatgccagggatcagctgaccatgtggttagcatctcgggagtgcctcttcagttacaaccaaacagcatacagacgaaggttgacagcattgcatggaagaagttgctgccctcacaaaatggatttcatcacatattgaagtgggagaatggctctttgccttccaatacttccaatgatagattcagttttatagtcaagaacttgagtcttctcatcaaggcagctcagcagcaggacagtggcctctactgcctggaggtcaccagtatatctggaaaagttcagacagccacgttccaggtttttgtatttgataaagttgagaaaccccgcctacaggggcaggggaagatcctggacagagggagatgccaagtggctctgtcttgcttggtctccagggatggcaatgtgtcctatgcttggtacagagggagcaagctgatccagacagcagggaacctcacctacctggacgaggaggttgacattaatggcactcacacatatacctgcaatgtcagcaatcctgttagctgggaaagccacaccctgaatctcactcaggactgtcagaatgcccatcaggaattcagattttggccgtttttggtgatcatcgtgattctaagcgcactgttccttggcacccttgcctgcttctgtgtgtggaggagaaagaggaaggagaagcagtcagagaccagtcccaaggaatttttgacaatttacgaagatgtcaaggatctgaaaaccaggagaaatcacgagcaggagcagacttttcctggaggggggagcaccatctactctatgatccagtcccagtcttctgctcccacgtcacaagaacctgcatatacattatattcattaattcagccttccaggaagtctggatccaggaagaggaaccacagcccttccttcaatagcactatctatgaagtgattggaaagagtcaacctaaagcccagaaccctgctcgattgagccgcaaagagctggagaactttgatgtttattcctagttgctgcagcaattctcacctttcttgcacatcagcatctgctttgggaattggcacagtggatgacggcacaggagtctctatagaacagttcctagtctggagaggatatggaaatttgttcttgttctatattttgttttgaaaatgatgtctaacaaccatgataagagcaaggctgttaaataatatcttccaatttacagatcagacatgaatgggtggaggggttaggttgttcacaaaaggccacattccaagtatttgtaatctagaaagtgttatgtaagtgatgttattagcatcgagattccctccacctgattttcaagctgtcacttgtttccttttctcccctctctgggttgactgcatttctagactctcgccggcccaggcccatcttccaaagcaagaggaaggaatgataatggtgactcaggggaagaagaaacagccctcctctgaaagcctggactgtccggctgtgaactggctggcaggttctgcacgtgggtgggggccagggcctgggctttactcaattgcagagaaaaaactttctccctgcatctcatacctttacctctggccagttggccaccagggggagtgggctgaagggagagtagatggtgcaaagcaagcccatctctaagtagaaaaatcacccagagcacatgctgacctgataactggggtgttgagaccagctttgtccatggtatgatgtttgatttatgaagacgcattgttagaaatccatttggcttcttcatagaagtggcttcccagaggaagaggcctctcagaaaccatgttctatttaagttctgagtcctgatgagtgttccccaggatgcacattgaagggagggctcaggcagctgagggctgagaatgaggcagttggaatctagacactatgctgggttccctgagtcgtcaggccagacatttcaacaaggctgtggggagcagggctgtgactctggctgagcccaggaaagcgacaagggtgaactgggagaggacttactcagagaccccaacaggtgatactgcacaaagcctggttcttcaattttcctaccctgtatctaacataggagtttcatataaaacggtgatatcatgcagatgcagtctgaattccttgcctgaattaaatttatgtatcctctcca

SEQ ID NO: 16 - DNA, 3221 bp, Homo sapiens
  source 1..3221: mol_type = genomic DNA
aacttcaaacatgggtgacgcaggccccacactgcctgctccccgtcccacccctccctgagcacgccaccccgccctctccctctctgagagcgagatacccggccagacaccctcacctgcggtgcccagctgcccaggctgaggcaagagaaggccagaaaccatgcccatggggtctctgcaaccgctggccaccttgtacctgctggggatgctggtcgcttcctgcctcggacggctcagctggtatgacccagatttccaggcaaggctcacccgttccaactcgaagtgccagggccagctggaggtctacctcaaggacggatggcacatggtttgcagccagagctggggccggagctccaagcagtgggaggaccccagtcaagcgtcaaaagtctgccagcggctgaactgtggggtgcccttaagccttggccccttccttgtcacctacacacctcagagctcaatcatctgctacggacaactgggctccttctccaactgcagccacagcagaaatgacatgtgtcactctctgggcctgacctgcttagaaccccagaagacaacacctccaacgacaaggcccccgcccaccacaactccagagcccacagctcctcccaggctgcagctggtggcacagtctggcggccagcactgtgccggcgtggtggagttctacagcggcagcctggggggtaccatcagctatgaggcccaggacaagacccaggacctggagaacttcctctgcaacaacctccagtgtggctccttcttgaagcatctgccagagactgaggcaggcagagcccaagacccaggggagccacgggaacaccagcccttgccaatccaatggaagatccagaactcaagctgtacctccctggagcattgcttcaggaaaatcaagccccagaaaagtggccgagttcttgccctcctttgctcaggtttccagcccaaggtgcagagccgtctggtggggggcagcagcatctgtgaaggcaccgtggaggtgcgccagggggctcagtgggcagccctgtgtgacagctcttcagccaggagctcgctgcggtgggaggaggtgtgccgggagcagcagtgtggcagcgtcaactcctatcgagtgctggacgctggtgacccaacatcccgggggctcttctgtccccatcagaagctgtcccagtgccacgaactttgggagagaaattcctactgcaagaaggtgtttgtcacatgccaggatccaaaccccgcaggcctggccgcaggcacggtggcaagcatcatcctggccctggtgctcctggtggtgctgctggtcgtgtgcggcccccttgcctacaagaagctagtgaagaaattccgccagaagaagcagcgccagtggattggcccaacgggaatgaaccaaaacatgtctttccatcgcaaccacacggcaaccgtccgatcccatgctgagaaccccacagcctcccacgtggataacgaatacagccaacctcccaggaactcccacctgtcagcttatccagctctggaaggggctctgcatcgctcctccatgcagcctgacaactcctccgacagtgactatgatctgcatggggctcagaggctgtaaagaactgggatccatgagcaaaaagccgagagccagacctgtttgtcctgagaaaactgtccgctcttcacttgaaatcatgtccctatttctaccccggccagaacatggacagaggccagaagccttccggacaggcgctgctgccccgagtggcaggccagctcacactctgctgcacaacagctcggccgcccctccacttgtggaagctgtggtgggcagagccccaaaacaagcagccttccaactagagactcgggggtgtctgaagggggccccctttccctgcccgctggggagcggcgtctcagtgaaatcggctttctcctcagactctgtccctggtaaggagtgacaaggaagctcacagctgggcgagtgcattttgaatagttttttgtaagtagtgcttttcctccttcctgacaaatcgagcgctttggcctcttctgtgcagcatccacccctgcggatccctctggggaggacaggaaggggactcccggagacctctgcagccgtggtggtcagaggctgctcacctgagcacaaagacagctctgcacattcaccgcagctgccagccaggggtctgggtgggcaccaccctgacccacagcgtcaccccactccctctgtcttatgactcccctccccaaccccctcatctaaagacaccttcctttccactggctgtcaagcccacagggcaccagtgccacccagggcccggcacaaaggggcgcctagtaaaccttaaccaacttggttttttgcttcacccagcaattaaaagtcccaagctgaggtagtttcagtccatcacagttcatcttctaacccaagagtcagagatggggctggtcatgttcctttggtttgaataactcccttgacgaaaacagactcctctagtacttggagatcttggacgtacacctaatcccatggggcctcggcttccttaactgcaagtgagaagaggaggtctacccaggagcctcgggtctgatcaagggagaggccaggcgcagctcactgcggcggctccctaagaaggtgaagcaacatgggaacacatcctaagacaggtcctttctccacgccatttgatgctgtatctcctgggagcacaggcatcaatggtccaagccgcataataagtctggaagagcaaaagggagttactaggatatggggtgggctgctcccagaatctgctcagctttctgcccccaccaacaccctccaaccaggccttgccttctgagagcccccgtggccaagcccaggtcacagatcttcccccgaccatgctgggaatccagaaacagggaccccatttgtcttcccatatctggtggaggtgagggggctcctcaaaagggaactgagaggctgctcttagggagggcaaaggttcgggggcagccagtgtctcccatcagtgccttttttaataaaagctctttcatctatagtttggccaccatacagtggcctcaaagcaaccatggcctacttaaaaaccaaaccaaaaataaagagtttagttgaggagaaa

SEQ ID NO: 17 - DNA, 1676 bp, Homo sapiens
  source 1..1676: mol_type = genomic DNA
agactcaacaagagctccagcaaagactttcactgtagcttgacttgacctgagattaactagggaatcttgagaataaagatgagctctgaaaattgtttcgtagcagagaacagctctttgcatccggagagtggacaagaaaatgatgccaccagtccccatttctcaacacgtcatgaagggtccttccaagttcctgtcctgtgtgctgtaatgaatgtggtcttcatcaccattttaatcatagctctcattgccttatcagtgggccaatacaattgtccaggccaatacacattctcaatgccatcagacagccatgtttcttcatgctctgaggactgggttggctaccagaggaaatgctactttatttctactgtgaagaggagctggacttcagcccaaaatgcttgttctgaacatggtgctactcttgctgtcattgattctgaaaaggacatgaactttctaaaacgatacgcaggtagagaggaacactgggttggactgaaaaaggaacctggtcacccatggaagtggtcaaatggcaaagaatttaacaactggttcaacgttacagggtctgacaagtgtgtttttctgaaaaacacagaggtcagcagcatggaatgtgagaagaatttatactggatatgtaacaaaccttacaaataataaggaaacatgttcacttattgactattatagaatggaactcaaggaaatctgtgtcagtggatgctgctctgtggtccgaagtcttccatagagactttgtgaaaaaaaattttatagtgtcttgggaattttcttccaaacagaactatggaaaaaaaggaagaaattccaggaaaatctgcactgtgggcttttattgccatgagctagaagcatcacaggttgaccaataaccatgcccaagaatgagaagaatgactatgcaacctttggatgcactttatattattttgaatccagaaataatgaaataactaggcgtggacttactatttattgctgaatgactaccaacagtgagagcccttcatgcatttgcactattggaaggagttagatgttggtactagatactgaatgtaaacaaaggaattatggctggtaacataggtttttagtctaattgaatcccttaaactcagggagcatttataaatggacaaatgcttatgaaactaagatttgtaatatttctctctttttagagaaatttgccaatttactttgttatttttccccaaaaagaatgggatgatcatgtatttatttttttacttcctcagctgtagacaggtccttttcgatggtacatatttctttgcctttataatcttttatacagtgtcttacagagaaaagacataagcaaagactatgaggaatatttgcaagacatagaatagtgttggaaaatgtgcaatatgtgatgtggcaaatctctattaggaaatattctgtaatcttcagacctagaataatactagtcttataataggtttgtgactttcctaaatcaattctattacgtgcaatacttcaatacttcatttaaaatatttttatgtgcaataaaatgtatttgtttgtattttgtgttcagtacaattataagctgtttttatatatgtgaaataaaagtagaataaacacaa

SEQ ID NO: 18 - DNA, 2657 bp, Homo sapiens
  source 1..2657: mol_type = genomic DNA
tttaatttctccgaggccagccagagcaggtttgttggcagcagtacccctccagcagtcacgcgaccagccaatctcccggcggcgctcggggaggcggcgcgctcgggaacgaggggaggtggcggaaccgcgccggggccaccttaaggccgcgctcgccagcctcggcggggcggctcccgccgccgcaaccaatggatctcctcctctgtttaaatagactcgccgtgtcaatcattttcttcttcgtcagcctcccttccaccgccatattgggccactaaaaaaagggggctcgtcttttcggggtgtttttctccccctcccctgtccccgcttgctcacggctctgcgactccgacgccggcaaggtttggagagcggctgggttcgcgggacccgcgggcttgcacccgcccagactcggacgggctttgccaccctctccgcttgcctggtcccctctcctctccgccctcccgctcgccagtccatttgatcagcggagactcggcggccgggccggggcttccccgcagcccctgcgcgctcctagagctcgggccgtggctcgtcggggtctgtgtcttttggctccgagggcagtcgctgggcttccgagaggggttcgggctgcgtaggggcgctttgttttgttcggttttgtttttttgagagtgcgagagaggcggtcgtgcagacccgggagaaagatgtcaaacgtgcgagtgtctaacgggagccctagcctggagcggatggacgccaggcaggcggagcaccccaagccctcggcctgcaggaacctcttcggcccggtggaccacgaagagttaacccgggacttggagaagcactgcagagacatggaagaggcgagccagcgcaagtggaatttcgattttcagaatcacaaacccctagagggcaagtacgagtggcaagaggtggagaagggcagcttgcccgagttctactacagacccccgcggccccccaaaggtgcctgcaaggtgccggcgcaggagagccaggatgtcagcgggagccgcccggcggcgcctttaattggggctccggctaactctgaggacacgcatttggtggacccaaagactgatccgtcggacagccagacggggttagcggagcaatgcgcaggaataaggaagcgacctgcaaccgacgattcttctactcaaaacaaaagagccaacagaacagaagaaaatgtttcagacggttccccaaatgccggttctgtggagcagacgcccaagaagcctggcctcagaagacgtcaaacgtaaacagctcgaattaagaatatgtttccttgtttatcagatacatcactgcttgatgaagcaaggaagatatacatgaaaattttaaaaatacatatcgctgacttcatggaatggacatcctgtataagcactgaaaaacaacaacacaataacactaaaattttaggcactcttaaatgatctgcctctaaaagcgttggatgtagcattatgcaattaggtttttccttatttgcttcattgtactacctgtgtatatagtttttaccttttatgtagcacataaactttggggaagggagggcagggtggggctgaggaactgacgtggagcggggtatgaagagcttgctttgatttacagcaagtagataaatatttgacttgcatgaagagaagcaattttggggaagggtttgaattgttttctttaaagatgtaatgtccctttcagagacagctgatacttcatttaaaaaaatcacaaaaatttgaacactggctaaagataattgctatttatttttacaagaagtttattctcatttgggagatctggtgatctcccaagctatctaaagtttgttagatagctgcatgtggcttttttaaaaaagcaacagaaacctatcctcactgccctccccagtctctcttaaagttggaatttaccagttaattactcagcagaatggtgatcactccaggtagtttggggcaaaaatccgaggtgcttgggagttttgaatgttaagaattgaccatctgcttttattaaatttgttgacaaaattttctcattttcttttcacttcgggctgtgtaaacacagtcaaaataattctaaatccctcgatatttttaaagatctgtaagtaacttcacattaaaaaatgaaatattttttaatttaaagcttactctgtccatttatccacaggaaagtgttatttttcaaggaaggttcatgtagagaaaagcacacttgtaggataagtgaaatggatactacatctttaaacagtatttcattgcctgtgtatggaaaaaccatttgaagtgtacctgtgtacataactctgtaaaaacactgaaaaattatactaacttatttatgttaaaagattttttttaatctagacaatatacaagccaaagtggcatgttttgtgcatttgtaaatgctgtgttgggtagaataggttttcccctcttttgttaaataatatggctatgcttaaaaggttgcatactgagccaagtataattttttgtaatgtgtgaaaaagatgccaattattgttacacattaagtaatcaataaagaaaacttccatagctatt

SEQ ID NO: 19 - DNA, 2592 bp, Homo sapiens
  source 1..2592: mol_type = genomic DNA
gccccacgcacggacaggagtgaacccgagctgtgccgaccaacccccaggatggcggaagctcaccaggccgtggccttccagttcacggtgaccccagacggggtcgacttccggctcagtcgggaggccctgaaacacgtctacctgtctgggatcaactcctggaagaaacgcctgatccgcatcaagaatggcatcctcaggggcgtgtaccctggcagccccaccagctggctggtcgtcatcatggcaacagtgggttcctccttctgcaacgtggacatctccttggggctggtcagttgcatccagagatgcctccctcaggggtgtggcccctaccagaccccgcagacccgggcacttctcagcatggccatcttctccacgggcgtctgggtgacgggcatcttcttcttccgccaaaccctgaagctgcttctctgctaccatgggtggatgtttgagatgcatggcaagaccagcaacttgaccaggatctgggctatgtgtatccgccttctatccagccggcaccctatgctctacagcttccagacatctctgcccaagcttcctgtgcccagggtgtcagccacaattcagcggtacctagagtctgtgcgccccttgttggatgatgaggaatattaccgcatggagttgctggccaaagaattccaggacaagactgcccccaggctgcagaaatacctggtgctcaagtcatggtgggcaagtaactatgtgagtgactggtgggaagagtacatctaccttcgaggcaggagccctctcatggtgaacagcaactattatgtcatggaccttgtgctcatcaagaatacagacgtgcaggcagcccgcctgggaaacatcatccacgccatgatcatgtatcgccgtaaactggaccgtgaagaaatcaagcctgtgatggcactgggcatagtgcctatgtgctcctaccagatggagaggatgttcaacaccactcggatcccgggcaaggacacagatgtgctacagcacctctcagacagccggcacgtggctgtctaccacaagggacgcttcttcaagctgtggctctatgagggcgcccgtctgctcaagcctcaggatctggagatgcagttccagaggatcctggacgacccctccccacctcagcctggggaggagaagctggcagccctcactgcaggaggaagggtggagtgggcgcaggcacgccaggccttctttagctctggaaagaataaggctgccttggaggccatcgagcgtgccgctttcttcgtggccctggatgaggaatcctactcctatgaccccgaagatgaggccagcctcagcctctatggcaaggccctgctacatggcaactgctacaacaggtggtttgacaaatccttcactctcatttccttcaagaatggccagttgggtctcaatgcagagcatgcgtgggcagatgctcccatcattgggcacctctgggagtttgtcctgggcacagacagcttccacctgggctacacggagaccgggcactgcctgggcaaaccgaaccctgcgctcgcacctcctacacggctgcagtgggacattccaaaacagtgccaggcggtcatcgagagttcctaccaggtggccaaggcgttggcagacgacgtggagttgtactgcttccagttcctgccctttggcaaaggcctcatcaagaagtgccggaccagccctgatgcctttgtgcagatcgcgctgcagctggctcacttccgggacaggggtaagttctgcctgacctatgaggcctcaatgaccagaatgttccgggagggacggactgagactgtgcgttcctgtaccagcgagtccacagcctttgtgcaggccatgatggaggggtcccacacaaaagcagacctgcgagatctcttccagaaggctgctaagaagcaccagaatatgtaccgcctggccatgaccggggcagggatcgacaggcacctcttctgcctttacttggtctccaagtacctaggagtcagctctcctttccttgctgaggtgctctcggaaccctggcgtctctccaccagccagatcccccaatcccagatccgcatgttcgacccagagcagcaccccaatcacctgggcgctggaggtggctttggccctgtagcagatgatggctatggagtttcctacatgattgcaggcgagaacacgatcttcttccacatctccagcaagttctcaagctcagagacgaacgcccagcgctttggaaaccacatccgcaaagccctgctggacattgctgatcttttccaagttcccaaggcctacagctgaagcccttaggtacctgtgttttgtttgggaactcggaggccctccccctcccccagctcagaccacagaggtggcaagagaagggctgaagctggaagactgttcatgagggacttgtgtgacctgctttgaaatgtgtgactctgctgagtgacgtaggctctgagatagctgtccacgcccacgtgtttgcttggaataaatacttgcctcagaaccttc

SEQ ID NO: 20 - DNA, 2696 bp, Homo sapiens
  source 1..2696: mol_type = genomic DNA
tggcagcgacgcggtgaggagacggcccacggcgcccgcgggctggggcggtcgcttcttccttctccgtggcctacgagggtctggatccttctctgccggctcgtgggccgtgcctttgcccttctgcgaggccctgaatctgatcccttcccttcatatccggatccgggctcctccctccaagcccggggttccggacacctcccccaagacaacccctctggcctcctctccttcagtacttggaatctgatctcttctccctaattctgcggatccggcccctaatattctttatcagaccctcagacaagaggctgacttctgcccccttgtcaaggagcgaggccactttcctctccaccccatgctagcgaggataacttatttctcttctggaattgcatcttatgcgcctttccccacccatccccacagcccctgcaatacccagtttggcctcttttgcttgtaataacgcagatcccagcgccacggcaccttagaacagacctttttctttctcgcgtggggcctgactccttcagtgaagcctctccacgccctctatctgcaggtccccagcctgggtaaagatggccccatggcccccgaagggcctagtcccagctatgctctggggcctcagcctcttcctcaacctcccaggacctatctggctccagccctctccacctccccagtcttctcccccgcctcagccccatccgtgtcatacctgccggggactggttgacagctttaacaagggcctggagagaaccatccgggacaactttggaggtggaaacactgcctgggaggaagagaatttgtccaaatacaaagacagtgagacccgcctggtagaggtgctggagggtgtgtgcagcaagtcagacttcgagtgccaccgcctgctggagctgagtgaggagctggtggagagctggtggtttcacaagcagcaggaggccccggacctcttccagtggctgtgctcagattccctgaagctctgctgccccgcaggcaccttcgggccctcctgccttccctgtcctgggggaacagagaggccctgcggtggctacgggcagtgtgaaggagaagggacacgagggggcagcgggcactgtgactgccaagccggctacgggggtgaggcctgtggccagtgtggccttggctactttgaggcagaacgcaacgccagccatctggtatgttcggcttgttttggcccctgtgcccgatgctcaggacctgaggaatcaaactgtttgcaatgcaagaagggctgggccctgcatcacctcaagtgtgtagacattgatgagtgtggcacagagggagccaactgtggagctgaccaattctgcgtgaacactgagggctcctatgagtgccgagactgtgccaaggcctgcctaggctgcatgggggcagggccaggtcgctgtaagaagtgtagccctggctatcagcaggtgggctccaagtgtctcgatgtggatgagtgtgagacagaggtgtgtccgggagagaacaagcagtgtgaaaacaccgagggcggttatcgctgcatctgtgccgagggctacaagcagatggaaggcatctgtgtgaaggagcagatcccagagtcagcaggcttcttctcagagatgacagaagacgagttggtggtgctgcagcagatgttctttggcatcatcatctgtgcactggccacgctggctgctaagggcgacttggtgttcaccgccatcttcattggggctgtggcggccatgactggctactggttgtcagagcgcagtgaccgtgtgctggagggcttcatcaagggcagataatcgcggccaccacctgtaggacctcctcccacccacgctgcccccagagcttgggctgccctcctgctggacactcaggacagcttggtttatttttgagagtggggtaagcacccctacctgccttacagagcagcccaggtacccaggcccgggcagacaaggcccctggggtaaaaagtagccctgaaggtggataccatgagctcttcacctggcggggactggcaggcttcacaatgtgtgaatttcaaaagtttttccttaatggtggctgctagagctttggcccctgcttaggattaggtggtcctcacaggggtggggccatcacagctccctcctgccagctgcatgctgccagttcctgttctgtgttcaccacatccccacaccccattgccacttatttattcatctcaggaaataaagaaaggtcttggaaagttaaaaggcatcagtcttactacctgtcccaccacccccaccttagggaaatgtcctagaatcctgggaaattgagggcttctttgatggtgagtggagaaaagatagaggagaaggttgcccctgaagtgctgttaggagaaggaggatagaggaatcagccttaggagggttccatgccagctgtcatttggcaaaggaccctggacagatgacttttgcctctgaacttcactcttctctttcctcaaatgggcttcataatgctttccactcaggcttaacatgagaattaaatgaggtgacaaatgtgaagacctggacagtacacaacagatattcaataaaagtgtggtcgccattatgaccagagcctccaagcctcaa

SEQ ID NO: 21 - DNA, 2892 bp, Homo sapiens
  source 1..2892: mol_type = genomic DNA
gacgcgcagcaggccccgcccacccaggcggtaggaacccactccggcccgctagacctgctgctatgtcccggccgcagcttcgacgctggcgcctcgtctctagcccgccgagcggcgtcccgggtctagcgctgctggcgctgctggcgctgctggcgctgcggctcgcggccgggaccgactgcccatgcccggagcctgagctctgccgcccgattcgccaccatccagatttcgaggtctttgtgtttgatgttggacagaaaacttggaaatcttatgattggtcacagattacaactgtggcaacatttggaaaatatgactcagaacttatgtgctacgctcattcaaaaggagccagagtagtacttaaaggtaacctttgatgtagcttggtctccaaagaacatagacagaagatgctataattatactggaatcgcagatgcttgtgacttcctctttgtgatgtcttatgatgaacaaagtcagatctggtcagaatgtattgcagcagccaatgctccctataatcagacattaactggatataatgactacatcaagatgagcattaatcctaagaaacttgtaatgggtgttccttggtatggttatgattatacctgcctgaatctgtctgaggatcatgtttgtaccattgcaaaagtccctttccggggggctccttgtagtgacgctgcaggacgtcaggtgccctacaaaacgatcatgaagcaaataaatagttctatttctggaaacctatgggataaagatcagcgggctccttattataactataaagatcctgctggccactttcatcaagtatggtatgataaccctcagagtatttctttaaaggcaacatatatacaaaactatcgcttacggggcattggcatgtggaatgcaaactgtcttgactactctggagatgctgtagccaaacagcaaactgaagaaatgtgggaagtcttaaagccaaagctgttacagagatgaacatcttttgtcaaaccattaagagttagaaagatgatctgtatcaacagatctagtttcttgcatttttattatgttgctatatacttttgttatccgtatactaaaaaaaaagaataaataaatgttttgattgtttgaatttgaaaaatacacacgaatgtcctcagtatccaggaacataaaggcaagaagcaagtcaacttacctattaaatattcctctattagatgtttcaacactataatttaattgggaaaaattgctttcagaattttattatgccatatttcccttcattatagtaaaatatatgctcacgaatcaatgctgatttttaaaatatgtataatctgaagtggaaattgtttgcttagagtttttaaaaacctagtctttgaaaagcagtttgtgctatacttttcccccaaccctccaataaatcttaaatttaaaacctacaatgtagtgtctcccctttaggttcatcaaactgatgaaaataatttttctgcttcctgactccatatagtatttatgttctctgaggtacttgaactaaatctttggacagtgagtgagaattaaaaagaatccagaagattaaatgtattcacaaaatagaagaatgtaacagtaatattttgaattggtaagttagaactacctaatattttccaactacattatttttatgaggctcatttgtaaaatttttaataataggaataacttgcagttgaacttgattctgttcactgtcacacttctaattattcatttcttcatttatggacatatataatttatttcttggctagcttgcttacatggttaaatttttctttctacatctgcaatgtatcttttttatttttattttttgtagagacagggtctcgctatgttgtccagatgggtctccaactcctgggctcaagcactcctcctgccttggcttcctaaagagctgggattacaggcatgagctgcattgtgcttttaatgatctaaagacactgattagcttctcaactagttctctttctaaaagatcaattttatacaaataagttttctaaatgtaataaagtctgttttctttctccagggaattaagaacaacattgtgctgcccttattagttcctaattacagattaaaaatctgtatctttgaactctagatttacataaatcctggcttccctgcacattttgcccctgtaaattggaatacatgatgattgaaccatctgttatgagaatattacatttcctatttacacaattgtttgtgacagagtaaaaaccattttcatagtatatgttggatcactgttgtcttcatatttctaaaataaatgaattaaaaaatttaaattcttagatgcttatctctatcatagctcagaatgcaacttcaatacccccattcttttatatttccagatttcttttaattaagatataatgaacaaattaagttaaatgaagtctgtattttcatgcaaatatattagtattcattaatatacatttattctttgcaaatagattttagttatattagctcttaaattgttaaataaattattattgaattttattattaaattattaaaatgaaaattataaaattagcactgtaaaataatatgtaaaggacttggaatgttaaaaataaccattcatcattttgctttatattacatctaatatttcctgaaacattttgtaatacccacatggaaagtggagaaagagaaaccttgtgctttttataaaacattgccaaggagaataatggttaaacaaatctgttcaaatacatatttaaatttttttacaaataaaagttttaaattaacatacctaa

SEQ ID NO: 22 - DNA, 1977 bp, Homo sapiens
  source 1..1977: mol_type = genomic DNA
gccttctgtgtgtgcacatgtgtaatacatatctgggatcaaagctatctatataaagtccttgattctgtgtgggttcaaacacatttcaaagcttcaggatcctgaaaggttttgctctacttcctgaagacctgaacaccgctcccataaagccatggcttgccttggatttcagcggcacaaggctcagctgaacctggctaccaggacctggccctgcactctcctgttttttcttctcttcatccctgtcttctgcaaagcaatgcacgtggcccagcctgctgtggtactggccagcagccgaggcatcgccagctttgtgtgtgagtatgcatctccaggcaaagccactgaggtccgggtgacagtgcttcggcaggctgacagccaggtgactgaagtctgtgcggcaacctacatgatggggaatgagttgaccttcctagatgattccatctgcacgggcacctccagtggaaatcaagtgaacctcactatccaaggactgagggccatggacacgggactctacatctgcaaggtggagctcatgtacccaccgccatactacctgggcataggcaacggaacccagatttatgtaattgatccagaaccgtgcccagattctgacttcctcctctggatccttgcagcagttagttcggggttgtttttttatagctttctcctcacagctgtttctttgagcaaaatgctaaagaaaagaagccctcttacaacaggggtctatgtgaaaatgcccccaacagagccagaatgtgaaaagcaatttcagccttattttattcccatcaattgagaaaccattatgaagaagagagtccatatttcaatttccaagagctgaggcaattctaacttttttgctatccagctatttttatttgtttgtgcatttggggggaattcatctctctttaatataaagttggatgcggaacccaaattacgtgtactacaatttaaagcaaaggagtagaaagacagagctgggatgtttctgtcacatcagctccactttcagtgaaagcatcacttgggattaatatggggatgcagcattatgatgtgggtcaaggaattaagttagggaatggcacagcccaaagaaggaaaaggcagggagcgagggagaagactatattgtacacaccttatatttacgtatgagacgtttatagccgaaatgatcttttcaagttaaattttatgccttttatttcttaaacaaatgtatgattacatcaaggcttcaaaaatactcacatggctatgttttagccagtgatgctaaaggttgtattgcatatatacatatatatatatatatatatatatatatatatatatatatatatatatatatatattttaatttgatagtattgtgcatagagccacgtatgtttttgtgtatttgttaatggtttgaatataaacactatatggcagtgtctttccaccttgggtcccagggaagttttgtggaggagctcaggacactaatacaccaggtagaacacaaggtcatttgctaactagcttggaaactggatgaggtcatagcagtgcttgattgcgtggaattgtgctgagttggtgttgacatgtgctttggggcttttacaccagttcctttcaatggtttgcaaggaagccacagctggtggtatctgagttgacttgacagaacactgtcttgaagacaatggcttactccaggagacccacaggtatgaccttctaggaagctccagttcgatgggcccaattcttacaaacatgtggttaatgccatggacagaagaaggcagcaggtggcagaatggggtgcatgaaggtttctgaaaattaacactgcttgtgtttttaactcaatattttccatgaaaatgcaacaacatgtataatatttttaattaaataaaaatctgtggtggtcgtttt

SEQ ID NO: 23 - DNA, 1624 bp, Homo sapiens
  source 1..1624: mol_type = genomic DNA
ccaaccacaagcaccaaagcagaggggcaggcagcacaccacccagcagccagagcaccagcccagccatggtccttgaggtgagtgaccaccaagtgctaaatgacgccgaggttgccgccctcctggagaacttcagctcttcctatgactatggagaaaacgagagtgactcgtgctgtacctccccgccctgcccacaggacttcagcctgaacttcgaccgggccttcctgccagccctctacagcctcctctttctgctggggctgctgggcaacggcgcggtggcagccgtgctgctgagccggcggacagccctgagcagcaccgacaccttcctgctccacctagctgtagcagacacgctgctggtgctgacactgccgctctgggcagtggacgctgccgtccagtgggtctttggctctggcctctgcaaagtggcaggtgccctcttcaacatcaacttctacgcaggagccctcctgctggcctgcatcagctttgaccgctacctgaacatagttcatgccacccagctctaccgccgggggcccccggcccgcgtgaccctcacctgcctggctgtctgggggctctgcctgcttttcgccctcccagacttcatcttcctgtcggcccaccacgacgagcgcctcaacgccacccactgccaatacaacttcccacaggtgggccgcacggctctgcgggtgctgcagctggtggctggctttctgctgcccctgctggtcatggcctactgctatgcccacatcctggccgtgctgctggtttccaggggccagcggcgcctgcgggccatgcggctggtggtggtggtcgtggtggcctttgccctctgctggaccccctatcacctggtggtgctggtggacatcctcatggacctgggcgctttggcccgcaactgtggccgagaaagcagggtagacgtggccaagtcggtcacctcaggcctgggctacatgcactgctgcctcaacccgctgctctatgcctttgtaggggtcaagttccgggagcggatgtggatgctgctcttgcgcctgggctgccccaaccagagagggctccagaggcagccatcgtcttcccgccgggattcatcctggtctgagacctcagaggcctcctactcgggcttgtgaggccggaatccgggctcccctttcgcccacagtctgacttccccgcattccaggctcctccctccctctgccggctctggctctccccaatatcctcgctcccgggactcactggcagccccagcaccaccaggtctcccgggaagccaccctcccagctctgaggactgcaccattgctgctccttagctgccaagccccatcctgccgcccgaggtggctgcctggagccccactgcccttctcatttggaaactaaaacttcatcttccccaagtgcggggagtacaaggcatggcgtagagggtgctgccccatgaagccacagcccaggcctccagctcagcagtgactgtggccatggtccccaagacctctatatttgctcttttatttttatgtctaaaatcctgcttaaaacttttcaataaacaagatcgtcaggacca

SEQ ID NO: 24 - DNA, 9252 bp, Homo sapiens
  source 1..9252: mol_type = genomic DNA
tgcgtcagaatgcgcctcacccctggcgaccccggaagtgggtcgggggcttggcctctgcccggccacagagccggagctggaggtgctgtcccgtctggcggcgatccccgggcagggcccggggccggggtttgaagatgctgaacgtcccttcccagtctttcccggcccccaggtcgcagcagcgtgtcgcctccggggggcgtagcaaggtacctttaaaacagggcagaagccttatggattggattcgactgaccaaaagtggaaaggatctaacgggattaaaaggcaggttaattgaagtaactgaagaagaacttaagaaacacaacaaaaaagatgattgttggatatgcataagaggtttcgtttataatgtcagcccttatatggagtatcatcctggtggagaagatgaactaatgagagcagcaggatcagatggtactgaactttttgatcaggttcatcgttgggtcaattatgaatccatgctgaaagaatgcctggttggcagaatggccattaaacctgctgttctgaaagactatcgtgaggaggaaaagaaagtcttaaatggcatgcttcccaagagccaagtgacagatacacttgccaaagaaggtcctagttatccaagctatgattggttccaaacagactctttagtcaccattgccatatatactaaacagaaggatatcaatttagactcaataatagttgatcatcagaatgattcctttagagcagaaacaattattaaggattgtttatatcttatacatattgggctaagccatgaggttcaggaagatttttctgtgcgggttgttgagagtgtgggaaaaatagagattgttctacaaaaaaaagagaatacttcttgggactttcttggccatcccctgaagaatcataattcacttattccaaggaaagatacaggtttgtactacagaaagtgccagttaatttccaaggaagatgttactcatgatacgaggcttttctgtttgatgctgccaccaagcactcatcttcaagtgcccattgggcaacatgtttacctcaagctacctattacaggtacagaaatagtaaagccatatacacctgtatctggttccttactctcagagttcaaggaaccagttcttcccaacaataaatacatctactttttgataaaaatctatcccactggactcttcacaccagagcttgatcgtcttcagattggagattttgtttctgtaagcagtcctgagggcaattttaaaatatccaagttccaagaattagaagatctctttttgttggcagctggaacaggcttcacaccaatggttaaaatactgaattatgctttgactgatatacccagtctcaggaaagtgaagctgatgttcttcaataaaacagaagatgatataatttggagaagccaattggagaaattagcatttaaagataaaagactggatgttgaatttgttctctcagcacctatttctgaatggaatggcaaacagggacatatttcaccagctcttctttctgaatttttgaaaagaaatttggacaaatccaaagttctcgtctgcatttgtggaccagtgccatttacagaacaaggagtaaggttgctgcatgatctcaacttttccaaaaatgagatccatagttttacagcataatgaagagctgtcattgtcctttattcaactagtttatctaaatttgtgattgcttagggttttttaagagaacatttttgtacataacaaaaggttaactagaatccagccttcagtttcttaaatgaaatcaaatgttccttcagtacaggtaacttcttggctttcttttgtaccacaacttattttactactgatatttgacctggaaagttaatcatggcaacaaatacatacaggattctttgttatgaatcacaaatttccttgccatttaaattatatcactgttctacaataagcacttgtgttttatgacatgataaagtaaatgatcacttcgatcatgtttctatgctgtaaaatgtcttattagcaatacagattaaattttaccttgcactgttaactcaggaaatgatcatttatgtccttgttattaatgttaaaacatagaatgttataacttattaagtgatccaaacatttttttgtgtgtgtatggcattgatgcagaatagaataaaattatacttaagttctttttaatccttgtggtagaaatgtggttgaatgcaacaatattgggccagcgtctcaaggggaattttaaaaggcagcaataaaatatattagagacatgacacacatgcgcctttggactaggtgtgttaacagagcttgagagagggaaccttgacagctatttttactcttagccaaaaacaaagacattaggaaagagagtgaaagtatagtgtctagttccacagcataaagttattatttggtgctttggaatgggttgaattttaattctttagtccatctaaatcagctggaaaaatgaggaacattctgccttgaatggttcttcccctggttggctgctttctccacaactggtggttcagcaggaagccctcttaggttcttgcatgtgggcaacttattttctcttcctgctgctttgtgcaactgtcaaatactttcacagattcagatcagcaaagggtatcaaggatagtcattgtgagcttttcgtgaggaaactgttgaatgcataggtagctactgtataagctaactaggatttttcagtcttagtacagctgcaatgttttcacagaaataggggattgaaagagtctccaatttctctgtaaatgattttgtaaacagctaaatctttgctgaatgaataatatactcaagaggaacacaatattaatattccccaaattacagacgcccagcttgtgaagcttcctatgtgcaaatggctggttgaacactatcactttttcctgtgcctctgtcttctgtagccaattccaccatcatcattattcacaaagacaggaatctagctgtcctggactggtactgttccctggtaggtaacaagaactttttctagcttcatgccttccccctacttatttttttccatctaagggtgaggtgatttggctctgtgtcctcacccaaatctcctctcaaattgtaattcccacatgtcgagggagggtcttggtgggaggtgattggatcatgggagtgattgcccccatgctgttctcatgatggtaagtgagttctcatgagatctgatggtttaaaagtgtggcacttcctccccacctcctgctgtattatgaagaaggtccttgcttcttctttgctttctaccataattgtacatttcctgaggcctccccagccatgcagaactgtgagtcaattaaacctcttttcttcataaattacccagtctcaggtagttctttatagcagtgtgaaaatagactaatataaaaagagactatttaccacttttttttagttcatttgcgatgtatcaaatctaacttagccaacatctttctcatcttttctaagcctcttcttttttctctctcctttcccaagcaacagaatctcctattagtcgctatatgtaatgcttcctcattcctccttttatgttttatatttttgtttatattttatttatattttgtttatattttgttatattttattatattttgttatatttatattttgtttatattttaaaacaaatccataagtgtctcctgggtaatctccactgacatgattttatcaacttacatgttaattcccaaatgggagtgactaatttgagaatcagctgagcttcagttttcaatatccatttacttcctgcataccaccccaccatccacctagtaagccattctagaactattaggaatcaacatcaatgtccccttctccagtctgactcttccataccagctaaccctgtcctatcatccctcagctggattagtacagtagcttgataattcatcttcatgctgcagtcctgatctcctaaaattcattctccattccagggtattctagaaggacttggaggaaaaaatcccctaagtagagcctcagtcttccaatgaatgcaaccaaatactgaggagcacagataggagtatagtttatcactgttattctcaagcaaataactcaaagactcctacatcacatatttgcagtgaagaagaattacgctcaaagtcacatttgcttgcaaattctgctttttttaaaaaaaagtttattaattttctattgctgctagatcaaattactacaaacttagtagcttaaaacaacacccatttattatctcacagttccatggcacagaaatctaggcacaatatggctcaactgggtcctctgcttaaagcctcacaaggctgtaatcagattgtcagctgagctgggctcttagctagaggctgtaaggggaagtccctagataagagttctttcagcctcattaggtagatttcagttccttgcagttgtaggactgagttccccatttccttgctagctgttagctgtgggctagtctttgtttctagaatttgcccacattccttctcatactttctgtgtggccctcttcagcattagtggatgaatctcatgctttcagtctctctgaattcccttgtgggcttcttcagcattggtagatgaatcttatgctttcaatctctctgaattccctttctgccatatctttcttgccctagcaagagttcactgcttttaagatctcatgtggttagattggacctatccagatatccagggtaatcttcctattttaaaaatctataattttaattatagctgtaaagtcccttttcctatataatatattcaaaggttgcaggcatttgggtgttgacatctttgatgggcacattgtgtctaccacaggctatagaaagaacagagaaatttgtccaagataagatgattaggttttgtctagataggggcccttgctatgggccctcagtttttaccttaatgtaacagaacatgagaggagctttgacacccaccccaaaagagtcaacttcattatgctggcaaaggcatgggtacaacctgctctgtgatctaccttctgaaccacacaagcttgtcctgaacgaggttggggctgagtctgttgataacagacccccatttttgggcagaaaaaacagattctgtatgatctacagtatttaacattgtggcaaataaattataaaggaaaaatggaatctcaagtagttacagtctcttggtgtctttcaacattggttttattttgaagtcattttcacccagcattgcaagtttagcagacctcaaaacagaatgccaaagtgatcttaaaattcaaaaatgagtttactttctttgttaaagttctcttttgatgcatatcccccattcatggaatggaagcattatcttgggtgcagcattacacgtagagttaaaatgtggaaacaacccaaacatcctgatatggtttggctctgtgtcaccacccaaatctcatcttgaattgtactctcataattcccatgtgttgtgggaggaacccagtgggagataatttgaatcatgggggcagtttccctcatactgttctcatggtagtgaataactctcacaagacctggtggttttatcaggggtttccgcttttgcatcttactcattttctcttgcggccgccatgtaagaagtgcctttcacctcctgccatgattctgaggcctccccagccatgtggaactgtaagtccaattaaacccctttttttccccagtctcaggtacgtcttttatcagcagcgtgaaaatggactaatacagtaaattggtaccagtagagcaggtgttgctgcaaagataccgggaaatgtggaagcaactttggaacttggtaacaggcagagattggaacagtttggagggctcagaagaagacaggaaaatgggaaagtttggaacttccttgagacttgttgaatggctttgacaaaaatactgataatgatatggacaatgaaatctagactgaggtggtctcaggtggagatgaggaacctgttgagaactggagcaaaggtgactcttgttatgatttagcaaagagactggcggcattttgcccctgccctggagatttgtggaactctgaacttgagagagatgattaagggtatctggtggaagaaatttctaagcagcaaagcattcaagaggtgactcaagtgttgttaaaggcattcagttttaaaagggaagcagagcattaaaattcagaaaattagcagcttgacaatgcgatagaaaagaaaatcctattttctgaggagaaattcaagctggctgtagatatttgcataagtaacaaggaactgaatgttaatttccaagacaatggggaaaatgtctccagggcatgtcagagacatttgtggcagcctcttctatcacagacctggaggtctaggaagaaaaaatggtaaaaatggttttgtgggcaaggcctagggtccttgtgctgtgtgcagtctaaggacttggtgccctgtttcctagccactccggccatggctgaaaggggccaacatgaagctcaggccatggcttcagagggtgaaagccttaagccttggcaacttccatgtgatgttgagcatgtgggtgcacagaagtcaagaaatggggtttgggaacctctgtctagatttcagaagatgtatggaaatgcctggatgcccaggcagaagtttgctgcaggggcggggctctcatggagaacctcggctagggcagtgcagaagggaaatgtggggttggagccccctcacagagtccctactgggacaccgcctagtggagctgtgagaagaggaccactgtcctccagaccccagaatggtagatcgacttacagcttgtaccaggtgcctggaaaagctgcagatactcaacaccagcccatgaaagcagccaggatggaggctgtaccctgaaagccacagggccagagctgcccaagaccatgggaagccacctcttgcatcagcgtgacctggatgtgagacctggagtaaaaggagatcattttggagctttaaaatttgactgccccactggattttggacttccatgggccctgtaacccctttgttttggccaatttctcccatttggaatggctgtatttacccaatacctgtaccctcattgtatctaggaagtaactagcttgcttttgattttacaggctcataagtggaagggacttgccttgtctcagatgagacttttgaactgtggacttttgggttaatgctgaaatgatttaagactttggggtactgttgggaatgcatgattggttttgaaatgtgaggacataagatttggaggagccaggggtgggatgatatggtttggctctgtgtccccacccaaatttcatcttgaattatactcccataattcccatgtgttatacgtgggacctggtgggagataatttgaatcatgggggtggtttcccccatactgttctcatggtagagaataagtctcatgagatctgatggtttcatcagggggttccgcttttgcatcttactcatttctcttgctgccaccctgtaagaagtatttttaacctaccgccatgattctgaggcctccccagccatgtggaactataagtccaattaaacctctttttcttggcttaatttcttgggtatgtctttatcagcagtgattctattcctatgaaatgtctagaacaggaaaatctatgagacataaagtaattaagtggctgttcaggggatacaggaataggggataataactaaagggttgggagggtgtttttgaaatgctaaaatattctgaagtttactgtggttatggttgcacatacttatgaatatacctaaaaatgttgaattgtacattttaagtagatgaattgtatctaatttgaaccatatctcagtaaagatataaaaatgtttttgggtactaagactaaactagaaagaacataagaggaaatacatattatataagaagaaaagagtaaaaataaatctttaaaaaaataaaaataaaaaggaggcctgtgtgcggtggctcatgcctgtaatcccagcactttgggaggccgaggcgggtggatcacctgaggtcgggagtttgagaccagcctgaccaacatggagaaaccctctctctactaaaaatacaaaattagccaggtgtggtagcataggcctgtaatccctgctacttgggaggctgaggcaggataattgcctgaacccgggaggcggaggttgcggtgagccgagattgcacctttgcactccagcctgggcaacaagagtgaaactccatctcaaaaaataaaacaaataaaaaggattctagaggaagtggtaaatagtgaagataggcaaagaatatccaacatatgaataatagtagtccttgaagacaaaaatcaaaggaaaagaatactaaaaactctacttaatgaaaaatcatcctgaaattaacaagaaaaattgaaattaatgttgaaagagcaccagagagtatacatccaaaaagaccaacattaatataaattttagtaaaattactgaaccatgaaaagtaaatgcctttagttatctaaacaaaaactaattacttaaaagggaaagaaaattagatcatcaccagacttttcaacagcattgccttatgctttaagaaagtgttgtaccacatttgatatcctgatggaaaaaaatgtgagccaaggattttacacccaacaaaacttaatggtgaatataaaggcataaaccaatatagaatgcaaaaacttgggaaatattgttttccaaagcctttcctaagtaatctacaaaagaacaagctttaaacaaccagaaagactagaaagtcatcaataaaaggattggagaacattaaacttgtagaactaaaacaaaatgagagttaaaaaagaaagagtataggtatatgctaaactatttcagtagttttggcagtggttgtattagtattgttattctgaagatgtgaaataatgcaaacgcataataaaaaatgtcatctggtc

SEQ ID NO: 25 - DNA, 2909 bp, Homo sapiens
  source 1..2909: mol_type = genomic DNA
acacaatacccacacatgcatatacccttctagtcagaggtctcccctcccccttcttcccacccccaggtgtaagaaggacgattccaggaacctaaggctttgttactctgccccattttcaatgaagggtaggagggagttagacaggggttggggcggggccagtgagcaggatgcctgggtctccagttcctgccagtgagtccctaggcctccatctctctcccttgctgtaccaccttcaccaccatccatgcgaccccaagagccttaatgactctagaagagactccaggcaggggaagctgaaaggacctttcactccctacttttggccagggccttctgtgccacctgccaagaccagcaggcctaccctctgaagaggtccaagcaacggaagtactactacgaagctgcctttctggccatccttgagaaaaatagacagatggccaaggagaggggcctaataagccccagtgattttgcccagctgcaaaaatacatggaatactccaccaaaaaggtcagtgatgtcctaaagctcttcgaggatggcgagatggctaaatatgtccaaggagatgccattgggtacgagggattccagcaattcctgaaaatctatctcgaagtggataatgttcccagacacctaagcctggcactgtttcaatcctttgagactggtcactgcttaaatgagacaaatgtgacaaaagatgtggtgtgtctcaatgatgtttcctgctacttttcccttctggagggtggtcggccagaagacaagttagaattcaccttcaagctgtacgacacggacagaaatgggatcctggacagctcagaagtggacaaaattatcctacagatgatgcgagtggctgaatacctggattgggatgtgtctgagctgaggccgattcttcaggagatgatgaaagagattgactatgatggcagtggctctgtctctcaagctgagtgggtccgggctggggccaccaccgtgccactgctagtgctgctgggtctggagatgactctgaaggacgacggacagcacatgtggaggcccaagaggttccccagaccagtctactgcaatctgtgcgagtcaagcattggtcttggcaaacagggactgagctgtaacctctgtaagtacactgttcacgaccagtgtgccatgaaagccctgccttgtgaagtcagcacctatgccaagtctcggaaggacattggtgtccaatcacatgtgtgggtgcgaggaggctgtgagtccgggcgctgcgaccgctgtcagaaaaagatccggatctaccacagtctgaccgggctgcattgtgtatggtgccacctagagatccacgatgactgcctgcaagcggtgggccatgagtgtgactgtgggctgctccgggatcacatcctgcctccatcttccatctatcccagtgtcctggcctctggaccggatcgtaaaaatagcaaaacaagccagaagaccatggatgatttaaatttgagcacctctgaggctctgcggattgaccctgttcctaacacccacccacttctcgtctttgtcaatcctaagagtggcgggaagcaggggcaaagggtgctctggaagttccagtatatattaaaccctcgacaggtgttcaacctcctaaaggatggtcctgagatagggctccgattattcaaggatgttcctgatagccggattttggtgtgtggtggagacggcacagtaggctggattctagagaccattgacaaagctaacttgccagttttgcctcctgttgctgtgttgcccctgggtactggaaatgatctggctcgatgcctaagatggggaggaggttatgaaggacagaatctggcaaagatcctcaaggatttagagatgagtaaagtggtacatatggatcgatggtctgtggaggtgatacctcaacaaactgaagaaaaaagtgacccagtcccctttcaaatcatcaataactacttctctattggcgtggatgcctctattgctcatcgattccacatcatgcgagagaaatatccggagaagttcaacagcagaatgaagaacaagctatggtacttcgaatttgccacatctgaatccatcttctcaacatgcaaaaagctggaggagtctttgacagttgagatctgtgggaaaccgctggatctgagcaacctgtccctagaaggcatcgcagtgctaaacatccctagcatgcatggtggctccaacctctggggtgataccaggagaccccatggggatatctatgggatcaaccaggccttaggtgctacagctaaagtcatcaccgaccctgatatcctgaaaacctgtgtaccagacctaagtgacaagagactggaagtggttgggctggagggtgcaattgagatgggccaaatctataccaagctcaagaatgctggacgtcggctggccaagtgctctgagatcaccttccacaccacaaaaacccttcccatgcaaattgacggagaaccctggatgcagacgccctgtacaatcaagatcacccacaagaaccagatgcccatgctcatgggcccacccccccgctccaccaatttctttggcttcttgagctaagggggacacccttggcctccaagccagccttgaacccacctccctgtccctggactctactcccgaggctctgtacattgctgccacatactcctgccagcttgggggagtgttccttcaccctcacagtatttattatcctgcaccacctcactgttccccatgcgcacacacatacacacaccccaaaacacatacattgaaagtgcctcatctgaataaaatgacttgtgtttcccctttggga

SEQ ID NO: 26 - DNA, 3482 bp, Homo sapiens
  source 1..3482: mol_type = genomic DNA
gcggcgcggagcgggcgtgctgagccccggccgccggcccggcatgggcgtctcccgcgggccctccgccggccggggctagggccggatggagccgcgggacggtagccccgaggcccggagcagcgactccgagtcggcttccgcctcgtccagcggctccgagcgcgacgccggtcccgagccggacaaggcgccgcggcgactcaacaagcggcgcttcccggggctgcggctcttcgggcacaggaaagccatcaccaagtcgggcctccagcacctggccccccctccgcccacccctggggccccgtgcagcgagtcagagcggcagatccggagtacagtggactggagcgagtcagcgacatatggggagcacatctggttcgagaccaacgtgtccggggacttctgctacgttggggagcagtactgtgtagccaggatgctgaagtcagtgtctcgaagaaagtgcgcagcctgcaagattgtggtgcacacgccctgcatcgagcagctggagaagataaatttccgctgtaagccgtccttccgtgaatcaggctccaggaatgtccgcgagccaacctttgtacggcaccactgggtacacagacgacgccaggacggcaagtgtcggcactgtgggaagggattccagcagaagttcaccttccacagcaaggagattgtggccatcagctgctcgtggtgcaagcaggcataccacagcaaggtgtcctgcttcatgctgcagcagatcgaggagccgtgctcgctgggggtccacgcagccgtggtcatcccgcccacctggatcctccgcgcccggaggccccagaatactctgaaagcaagcaagaagaagaagagggcatccttcaagaggaagtccagcaagaaagggcctgaggagggccgctggagacccttcatcatcaggcccaccccctccccgctcatgaagcccctgctggtgtttgtgaaccccaagagtgggggcaaccagggtgcaaagatcatccagtctttcctctggtatctcaatccccgacaagtcttcgacctgagccagggagggcccaaggaggcgctggagatgtaccgcaaagtgcacaacctgcggatcctggcgtgcgggggcgacggcacggtgggctggatcctctccaccctggaccagctacgcctgaagccgccaccccctgttgccatcctgcccctgggtactggcaacgacttggcccgaaccctcaactggggtgggggctacacagatgagcctgtgtccaagatcctctcccacgtggaggaggggaacgtggtacagctggaccgctgggacctccacgctgagcccaaccccgaggcagggcctgaggaccgagatgaaggcgccaccgaccggttgcccctggatgtcttcaacaactacttcagcctgggctttgacgcccacgtcaccctggagttccacgagtctcgagaggccaacccagagaaattcaacagccgctttcggaataagatgttctacgccgggacagctttctctgacttcctgatgggcagctccaaggacctggccaagcacatccgagtggtgtgtgatggaatggacttgactcccaagatccaggacctgaaaccccagtgtgttgttttcctgaacatccccaggtactgtgcgggcaccatgccctggggccaccctggggagcaccacgactttgagccccagcggcatgacgacggctacctcgaggtcattggcttcaccatgacgtcgttggccgcgctgcaggtgggcggacacggcgagcggctgacgcagtgtcgcgaggtggtgctcaccacatccaaggccatcccggtgcaggtggatggcgagccctgcaagcttgcagcctcacgcatccgcatcgccctgcgcaaccaggccaccatggtgcagaaggccaagcggcggagcgccgcccccctgcacagcgaccagcagccggtgccagagcagttgcgcatccaggtgagtcgcgtcagcatgcacgactatgaggccctgcactacgacaaggagcagctcaaggaggcctctgtgccgctgggcactgtggtggtcccaggagacagtgacctagagctctgccgtgcccacattgagagactccagcaggagcccgatggtgctggagccaagtccccgacatgccagaaactgtcccccaagtggtgcttcctggacgccaccactgccagccgcttctacaggatcgaccgagcccaggagcacctcaactatgtgactgagatcgcacaggatgagatttatatcctggaccctgagctgctgggggcatcggcccggcctgacctcccaacccccacttcccctctccccacctcaccctgctcacccacgccccggtcactgcaaggggatgctgcaccccctcaaggtgaagagctgattgaggctgccaagaggaacgacttctgtaagctccaggagctgcaccgagctgggggcgacctcatgcaccgagacgagcagagtcgcacgctcctgcaccacgcagtcagcactggcagcaaggatgtggtccgctacctgctggaccacgcccccccagagatccttgatgcggtggaggaaaacggggagacctgtttgcaccaagcagcggccctgggccagcgcaccatctgccactacatcgtggaggccggggcctcgctcatgaagacagaccagcagggcgacactccccggcagcgggctgagaaggctcaggacaccgagctggccgcctacctggagaaccggcagcactaccagatgatccagcgggaggaccaggagacggctgtgtagcgggccgcccacgggcagcaggagggacaatgcggccaggggacgagcgccttccttgcccacctcactgccacattccagtgggacggccacggggggacctaggccccagggaaagagccccatgccgccccctaaggagccgcccagacctagggctggactcaggagctgggggggcctcacctgttcccctgaggaccccgccggacccggaggctcacagggaacaagacacggctgggttggatatgcctttgccggggttctggggcagggcgctccctggccgcagcagatgccctcccaggagtggaggggctggagagggggaggccttcgggaagaggcttcctgggccccctggtcttcggccgggtccccagcccccgctcctgccccaccccacctcctccgggcttcctcccggaaactcagcgcctgctgcacttgcctgccctgccttgcttggcacccgctccggcgaccctccccgctcccctgtcatttcatcgcggactgtgcggcctgggggtggggggcgggactctcacggtgacatgtttacagctgggtgtgactcagtaaagtggatttttttttcttt

SEQ ID NO: 27 - DNA, 3517 bp, Homo sapiens
  source 1..3517: mol_type = genomic DNA
gttggttttggggtgtggggggttggtggcactatgtggcgcgtctgtgcgcgacgggctcagaatgtagccccatgggcgggactcgaggctcggtggacggccttgcaggaggtacccggaactccacgagtgacctcgcgatctggcccggctcccgctcgtcgcaacagcgtgactacagggtatggcggggtccgggcactgtgcggctggacccccagttctggggccacgccgcggaaccgcttactgctgcagcttttggggtcgcccggccgccgctattacagtcttcccccgcatcagaaggttccattgccttctctttcccccacaatgcaggcaggcaccatagcccgttgggaaaaaaaagagggggacaaaatcaatgaaggtgacctaattgcagaggttgaaactgataaagccactgttggatttgagagcctggaggagtgttatatggcaaagatacttgttgctgaaggtaccagggatgttcccatcggagcgatcatctgtatcacagttggcaagcctgaggatattgaggcctttaaaaattatacactggattcctcagcagcacctaccccacaagcggccccagcaccaacccctgctgccactgcttcgccacctacaccttctgctcaggctcctggtagctcatatccccctcacatgcaggtggccgctgttcctccaactccccagcctttagctcctacaccttcagcaccctgcccagctactcctgctggaccaaagggaagggtgtttgttagccctcttgcaaagaagttggcagtagagaaagggattgatcttacacaagtaaaagggacaggaccagatggtagaatcaccaagaaggatatcgactcttttgtgcctagtaaagttgctcctgctccggcagctgttgtgcctcccacaggtcctggaatggcaccagttcctacaggtgtcttcacagatatcccaatcagcaacattcgtcgggttattgcacagcgattaatgcaatcaaagcaaaccatacctcattattacctttctatcgatgtaaatatgggagaagttttgttggtacggaaagaacttaataagatattagaagggagaagcaaaatttctgtcaatgacttcatcataaaagcttcagctttggcatgtttaaaagttcccgaagcaaattcttcttggatggacacagttataagacaaaatcatgttgttgatgtcagtgttgcggtcagtactcctgcaggactcatcacacctattgtgtttaatgcacatataaaaggagtggaaaccattgctaatgatgttgtttctttagcaaccaaagcaagagagggtaaactacagccacatgaattccagggtggcacttttacgatctccaatttaggaatgtttggaattaagaatttctctgctattattaacccacctcaagcatgtattttggcaattggtgcttcagaggataaactggtccctgcagataatgaaaaagggtttgatgtggctagcatgatgtctgttacactcagttgtgatcaccgggtggtggatggagcagttggagcccagtggcttgctgagtttagaaagtaccttgaaaaacctatcactatgttgttgtaactaactcaagaatttctaaactctcccaggtcacactgattcattcttaacaagatatttatatgttattaaacaggtggttctttttattttaaccagttatttttattattgagtctgtccagataagttatttataatgggcattactgaatttttaaaatgccgattacacccaaatattgtgcacatttaataatcagacaccagatttttagctctgtactcctaattaagggacatgtatgtggccttgcctagccctttggtgataagtacttcctctaggaaatgtacgataggtagaattgtggttccctaaagacaagtacataaaggtgaccctgatgaaaccttgaagttctgaaatttaactgcctaaaatgttctccttagatgtgagagaaagagaaatcagaaaaattaattctcttgggggaagggcttgaattgaagctttactttagaatttagccctggtttgaaattttccattacatgatcttggtttatcatcgatgggaagggtagaaaacttcaaggaaaataagtgaaattttaaaagtcagcattttcttagacctcttcagctgattgtttatttttctatgaattcctacacatggttattcccccctacttgagataatctaaatataaaccagctacttgatgtaactgagaatttgtgtggatatttatttaaacaaatgtgtaattttgagtacagaattcaacagttacctccaaaaaagaaacattgttaatataatttaacagaagttgtgaaactaaaattttctaagattaactggtagttcattgtaaatgaacataatgaacagaatttatgactccactgtggaaaatgctatcaaataactaaggaatatatatggaataagtgtacatatgtaaaatattgttactagagttagatatgtgccaaagtccatttatcccaaatcctgtctgaaaaggaggggtacattggtaaacattttggagtgcttaaaaatgccaaaaacaaaatggtaatttctactttgataaagtaaaaaagttaaatgtgtgtaaaaaagtgttctgtgtccttctactccagcatcgtctcatgtaaaataagaaagccctaaaatactattggagagaaaaaattaactaggttgctactttatttgcctaaatacttttttctattttgttagattttgcctttcttttggaaggaaggaggcgatattctggattataaaaatgaattgggaacattatcacaattccagactttctattaatatttatgtgttttaataaacgtttgaaattatttatgactacttaaaatgaatctgaccagtgcttcctggtatatgtaatatgtggagttagcccctgaaatttgctttaagtgtttcagtgttgaatctgtttctaaatattcattattacatggtacacaagtgacactccatatattccacacagacttttaccttgctgtattattatgaaaacaatacattaatttgatttttcagtaattagtaattttaggttgaagattatccaaaagaaacaagcttatcacaagggaccatcatcaatatgatccaaatctggttcaaacattcaaaacttcaaagataattcatctttcgctaatgcttgtggttctgttgttcccttgaaaaaaaataaaaacagttgccttctaataaacattgttgagttaaaaattaatctgagctataatctaaatcgattcagtctcttaccagaactgaaagaaaaaagttagaaatagtgtttttggttcatatgattatttaaaaattaaagtataaatcttcaa

SEQ ID NO: 28 - DNA, 5408 bp, Homo sapiens
  source 1..5408: mol_type = genomic DNA
tccgcgtggggggggtgtgtgcccgccttgcgcatgcgtgttccctgggcatggccggctccgttccatccttctgcacagggtatcgcctctctccgtttggtacatcccctcctcccccacgcccggactggggtggtagacgccgcctccgctcatcgcccctccccatcggtttccgcgcgaaaagccggggcgcctgcgctgccgccgccgcgtctgctgaagcctccgagatgccggcgcgtaccgccccagcccgggtgcccacactggccgtcccggccatctcgctgcccgacgatgtccgcaggcggctcaaagatttggaaagagacagcttaacagaaaaggaatgtgtgaaggagaaattgaatctcttgcacgaatttctgcaaacagaaataaagaatcagttatgtgacttggaaaccaaattacgtaaagaagaattatccgaggagggctacctggctaaagtcaaatcccttttaaataaagatttgtccttggagaacggtgctcatgcttacaaccgggaagtgaatggacgtctagaaaacgggaaccaagcaagaagtgaagcccgtagagtgggaatggcagatgccaacagcccccccaaacccctttccaaacctcgcacgcccaggaggagcaagtccgatggagaggctaagcctgaaccttcacctagccccaggattacaaggaaaagcaccaggcaaaccaccatcacatctcattttgcaaagggccctgccaaacggaaacctcaggaagagtctgaaagagccaaatcggatgagtccatcaaggaagaagacaaagaccaggatgagaagagacgtagagttacatccagagaacgagttgctagaccgcttcctgcagaagaacctgaaagagcaaaatcaggaacgcgcactgaaaaggaagaagaaagagatgaaaaagaagaaaagagactccgaagtcaaaccaaagaaccaacacccaaacagaaactgaaggaggagccggacagagaagccagggcaggcgtgcaggctgacgaggacgaagatggagacgagaaagatgagaagaagcacagaagtcaacccaaagatctagctgccaaacggaggcccgaagaaaaagaacctgaaaaagtaaatccacagatttctgatgaaaaagacgaggatgaaaaggaggagaagagacgcaaaacgacccccaaagaaccaacggagaaaaaaatggctcgcgccaaaacagtcatgaactccaagacccaccctcccaagtgcattcagtgcgggcagtacctggacgaccctgacctcaaatatgggcagcacccaccagacgcggtggatgagccacagatgctgacaaatgagaagctgtccatctttgatgccaacgagtctggctttgagagttatgaggcgcttccccagcacaaactgacctgcttcagtgtgtactgtaagcacggtcacctgtgtcccatcgacaccggcctcatcgagaagaatatcgaactcttcttttctggttcagcaaaaccaatctatgatgatgacccatctcttgaaggtggtgttaatggcaaaaatcttggccccataaatgaatggtggatcactggctttgatggaggtgaaaaggccctcatcggcttcagcacctcatttgccgaatacattctgatggatcccagtcccgagtatgcgcccatatttgggctgatgcaggagaagatctacatcagcaagattgtggtggagttcctgcagagcaattccgactcgacctatgaggacctgatcaacaagatcgagaccacggttcctccttctggcctcaacttgaaccgcttcacagaggactccctcctgcgacacgcgcagtttgtggtggagcaggtggagagttatgacgaggccggggacagtgatgagcagcccatcttcctgacaccctgcatgcgggacctgatcaagctggctggggtcacgctgggacagaggcgagcccaggcgaggcggcagaccatcaggcattctaccagggagaaggacaggggacccacgaaagccaccaccaccaagctggtctaccagatcttcgatactttcttcgcagagcaaattgaaaaggatgacagagaagacaaggagaacgcctttaagcgccggcgatgtggcgtctgtgaggtgtgtcagcagcctgagtgtgggaaatgtaaagcctgcaaggacatggttaaatttggtggcagtggacggagcaagcaggcttgccaagagcggaggtgtcccaatatggccatgaaggaggcagatgacgatgaggaagtcgatgataacatcccagagatgccgtcacccaaaaaaatgcaccaggggaagaagaagaaacagaacaagaatcgcatctcttgggtcggagaagccgtcaagactgatgggaagaagagttactataagaaggtgtgcattgatgcggaaaccctggaagtgggggactgtgtctctgttattccagatgattcctcaaaaccgctgtatctagcaagggtcacggcgctgtgggaggacagcagcaacgggcagatgtttcacgcccactggttctgcgctgggacagacacagtcctcggggccacgtcggaccctctggagctgttcttggtggatgaatgtgaggacatgcagctttcatatatccacagcaaagtgaaagtcatctacaaagccccctccgaaaactgggccatggagggaggcatggatcccgagtccctgctggagggggacgacgggaagacctacttctaccagctgtggtatgatcaagactacgcgagattcgagtcccctccaaaaacccagccaacagaggacaacaagttcaaattctgtgtgagctgtgcccgtctggctgagatgaggcaaaaagaaatccccagggtcctggagcagctcgaggacctggatagccgggtcctctactactcagccaccaagaacggcatcctgtaccgagttggtgatggtgtgtacctgccccctgaggccttcacgttcaacatcaagctgtccagtcccgtgaaacgcccacggaaggagcccgtggatgaggacctgtacccagagcactaccggaaatactccgactacatcaaaggcagcaacctggatgcccctgagccctaccgaattggccggatcaaagagatcttctgtcccaagaagagcaacggcaggcccaatgagactgacatcaaaatccgggtcaacaagttctacaggcctgagaacacccacaagtccactccagcgagctaccacgcagacatcaacctgctctactggagcgacgaggaggccgtggtggacttcaaggctgtgcagggccgctgcaccgtggagtatggggaggacctgcccgagtgcgtccaggtgtactccatgggcggccccaaccgcttctacttcctcgaggcctataatgcaaagagcaaaagctttgaagatcctcccaaccatgcccgtagccctggaaacaaagggaagggcaagggaaaagggaagggcaagcccaagtcccaagcctgtgagccgagcgagccagagatagagatcaagctgcccaagctgcggaccctggatgtgttttctggctgcggggggttgtcggagggattccaccaagcaggcatctctgacacgctgtgggccatcgagatgtgggaccctgcggcccaggcgttccggctgaacaaccccggctccacagtgttcacagaggactgcaacatcctgctgaagctggtcatggctggggagaccaccaactcccgcggccagcggctgccccagaagggagacgtggagatgctgtgcggcgggccgccctgccagggcttcagcggcatgaaccgcttcaattcgcgcacctactccaagttcaaaaactctctggtggtttccttcctcagctactgcgactactaccggccccggttcttcctcctggagaatgtcaggaactttgtctccttcaagcgctccatggtcctgaagctcaccctccgctgcctggtccgcatgggctatcagtgcaccttcggcgtgctgcaggccggtcagtacggcgtggcccagactaggaggcgggccatcatcctggccgcggcccctggagagaagctccctctgttcccggagccactgcacgtgtttgctccccgggcctgccagctgagcgtggtggtggatgacaagaagtttgtgagcaacataaccaggttgagctcgggtcctttccggaccatcacggtgcgagacacgatgtccgacctgccggaggtgcggaatggagcctcggcactggagatctcctacaacggggagcctcagtcctggttccagaggcagctccggggcgcacagtaccagcccatcctcagggaccacatctgtaaggacatgagtgcattggtggctgcccgcatgcggcacatccccttggccccagggtcagactggcgcgatctgcccaacatcgaggtgcggctctcagacggcaccatggccaggaagctgcggtatacccaccatgacaggaagaacggccgcagcagctctggggccctccgtggggtctgctcctgcgtggaagccggcaaagcctgcgaccccgcagccaggcagttcaacaccctcatcccctggtgcctgccccacaccgggaaccggcacaaccactgggctggcctctatggaaggctcgagtgggacggcttcttcagcacaaccgtcaccaaccccgagcccatgggcaagcagggccgcgtgctccacccagagcagcaccgtgtggtgagcgtgcgggagtgtgcccgctcccagggcttccctgacacctaccggctcttcggcaacatcctggacaagcaccggcaggtgggcaatgccgtgccaccgcccctggccaaagccattggcttggagatcaagctttgtatgttggccaaagcccgagagagtgcctcagctaaaataaaggaggaggaagctgctaaggactagttctgccctcccgtcacccctgtttctggcaccaggaatccccaacatgcactgatgttgtgtttttaacatgtcaatctgtccgttcacatgtgtggtacatggtgtttgtggccttggctgacatgaagctgttgtgtgaggttcgcttatcaactaatgatttagtgatcaaattgtgcagtactttgtgcattctggattttaaaagttttttattatgcattatatcaaatctaccactgtatgagtggaaattaagactttatgtagtttttatatgttgtaatatttcttcaaataaatctctcctataaacca

SEQ ID NO: 29 - DNA, 9501 bp, Homo sapiens
  source 1..9501: mol_type = genomic DNA
gcagtgggctctggcggaggtcgggagaactgcagggcgaaggccgccgggggctccgcgggctgcggggggaggcacttgacaccggcccggggagaggaggggccgctgtccctgcggccagtgctggatgcggggacccagcgcagaagcagcgccaggtggagccatcgaagcccccacccacaggctgacagaggcaccgttcaccagagggctcaacaccgggatctatgtttaagttttaactctcgcctccaaagaccacgataattccttccccaaagcccagcagccccccagccccgcgcagccccagcctgcctcccggcgcccagatgcccgccatgccctccagcggccccggggacaccagcagctctgctgcggagcgggaggaggaccgaaaggacggagaggagcaggaggagccgcgtggcaaggaggagcgccaagagcccagcaccacggcacggaaggtggggcggcctgggaggaagcgcaagcaccccccggtggaaagcggtgacacgccaaaggaccctgcggtgatctccaagtccccatccatggcccaggactcaggcgcctcagagctattacccaatggggacttggagaagcggagtgagccccagccagaggaggggagccctgctggggggcagaagggcggggccccagcagagggagagggtgcagctgagaccctgcctgaagcctcaagagcagtggaaaatggctgctgcacccccaaggagggccgaggagcccctgcagaagcgggcaaagaacagaaggagaccaacatcgaatccatgaaaatggagggctcccggggccggctgcggggtggcttgggctgggagtccagcctccgtcagcggcccatgccgaggctcaccttccaggcgggggacccctactacatcagcaagcgcaagcgggacgagtggctggcacgctggaaaagggaggctgagaagaaagccaaggtcattgcaggaatgaatgctgtggaagaaaaccaggggcccggggagtctcagaaggtggaggaggccagccctcctgctgtgcagcagcccactgaccccgcatcccccactgtggctaccacgcctgagcccgtggggtccgatgctggggacaagaatgccaccaaagcaggcgatgacgagccagagtacgaggacggccggggctttggcattggggagctggtgtgggggaaactgcggggcttctcctggtggccaggccgcattgtgtcttggtggatgacgggccggagccgagcagctgaaggcacccgctgggtcatgtggttcggagacggcaaattctcagtggtgtgtgttgagaagctgatgccgctgagctcgttttgcagtgcgttccaccaggccacgtacaacaagcagcccatgtaccgcaaagccatctacgaggtcctgcaggtggccagcagccgcgcggggaagctgttcccggtgtgccacgacagcgatgagagtgacactgccaaggccgtggaggtgcagaacaagcccatgattgaatgggccctggggggcttccagccttctggccctaagggcctggagccaccagaagaagagaagaatccctacaaagaagtgtacacggacatgtgggtggaacctgaggcagctgcctacgcaccacctccaccagccaaaaagccccggaagagcacagcggagaagcccaaggtcaaggagattattgatgagcgcacaagagagcggctggtgtacgaggtgcggcagaagtgccggaacattgaggacatctgcatctcctgtgggagcctcaatgttaccctggaacaccccctcttcgttggaggaatgtgccaaaactgcaagaactgctttctggagtgtgcgtaccagtacgacgacgacggctaccagtcctactgcaccatctgctgtgggggccgtgaggtgctcatgtgcggaaacaacaactgctgcaggtgcttttgcgtggagtgtgtggacctcttggtggggccgggggctgcccaggcagccattaaggaagacccctggaactgctacatgtgcgggcacaagggtacctacgggctgctgcggcggcgagaggactggccctcccggctccagatgttcttcgctaataaccacgaccaggaatttgaccctccaaaggtttacccacctgtcccagctgagaagaggaagcccatccgggtgctgtctctctttgatggaatcgctacagggctcctggtgctgaaggacttgggcattcaggtggaccgctacattgcctcggaggtgtgtgaggactccatcacggtgggcatggtgcggcaccaggggaagatcatgtacgtcggggacgtccgcagcgtcacacagaagcatatccaggagtggggcccattcgatctggtgattgggggcagtccctgcaatgacctctccatcgtcaaccctgctcgcaagggcctctacgagggcactggccggctcttctttgagttctaccgcctcctgcatgatgcgcggcccaaggagggagatgatcgccccttcttctggctctttgagaatgtggtggccatgggcgttagtgacaagagggacatctcgcgatttctcgagtccaaccctgtgatgattgatgccaaagaagtgtcagctgcacacagggcccgctacttctggggtaaccttcccggtatgaacaggccgttggcatccactgtgaatgataagctggagctgcaggagtgtctggagcatggcaggatagccaagttcagcaaagtgaggaccattactacgaggtcaaactccataaagcagggcaaagaccagcattttcctgtcttcatgaatgagaaagaggacatcttatggtgcactgaaatggaaagggtatttggtttcccagtccactatactgacgtctccaacatgagccgcttggcgaggcagagactgctgggccggtcatggagcgtgccagtcatccgccacctcttcgctccgctgaaggagtattttgcgtgtgtgtaagggacatgggggcaaactgaggtagcgacacaaagttaaacaaacaaacaaaaaacacaaaacataataaaacaccaagaacatgaggatggagagaagtatcagcacccagaagagaaaaaggaatttaaaacaaaaaccacagaggcggaaataccggagggctttgccttgcgaaaagggttggacatcatctcctgatttttcaatgttattcttcagtcctatttaaaaacaaaaccaagctcccttcccttcctcccccttcccttttttttcggtcagaccttttattttctactcttttcagaggggttttctgtttgtttgggttttgtttcttgctgtgactgaaacaagaaggttattgcagcaaaaatcagtaacaaaaaatagtaacaataccttgcagaggaaaggtgggagagaggaaaaaaggaaattctatagaaatctatatattgggttgtttttttttttgttttttgttttttttttttgggtttttttttttactatatatcttttttttgttgtctctagcctgatcagataggagcacaagcaggggacggaaagagagagacactcaggcggcagcattccctcccagccactgagctgtcgtgccagcaccattcctggtcacgcaaaacagaacccagttagcagcagggagacgagaacaccacacaagacatttttctacagtatttcaggtgcctaccacacaggaaaccttgaagaaaatcagtttctagaagccgctgttacctcttgtttacagtttatatatatatgatagatatgagatatatatataaaaggtactgttaactactgtacaacccgacttcataatggtgctttcaaacagcgagatgagtaaaaacatcagcttccacgttgccttctgcgcaaagggtttcaccaaggatggagaaagggagacagcttgcagatggcgcgttctcacggtgggctcttccccttggtttgtaacgaagtgaaggaggagaacttgggagccaggttctccctgccaaaaagggggctagatgaggtggtcgggcccgtggacagctgagagtgggattcatccagactcatgcaataaccctttgattgttttctaaaaggagactccctcggcaagatggcagagggtacggagtcttcaggcccagtttctcactttagccaattcgagggctccttgtggtgggatcagaactaatccagagtgtgggaaagtgacagtcaaaaccccacctggagcaaataaaaaaacatacaaaacgtactggtgctttcctgtctaagtcgccttttgtgtgttcttttatgaggcccccaccatccacccctctgtgcacaaggcggctcccggcccctggaatgtgatgtttttggtcatctccaaaggctgcagttttatactgggaggctgatgacaccttttattataattattcttatggttctggttataattatgtttgttttaagattttctttaagaaaacaaaaacccaacacccttccctttaggtttcaaaccaaggtgcgggagcagggtgcttctgagttagcggtggctctggtgccctggctcccacccctcgggccaggtgggccactgggcatggtgacagctgggcggccagggagtccccaaggtctgccttctgggcttgtcactcttctcttctacttcccctcctcttgagtcgggtgtgtcagggctggagggaggaccggccgtctctctccttgtgtgtgtgattggagtggtgtgtatttcttttctagtacttggtctgatgatagctgtgctcttacctcgagtcagcagcacctggagccccaagtgctcaacactttgttctacttcctacaaggcaggcggcctggcgtcagtagtaggaagggatggcattgttggctccagggtgagggcccgacgggcaggtgcttgcctgggtagatggggtgtagatatgtggcatatagagatatatattttataatgggaggggggatggcacctcctgggactggtagagctgggaggtgtgtcggcaagcacatggccccaagtccacgtccctagaaagatggggcctacagtgataggcgctctataaatacatagatagggtcatgtttaagaaatattatggggtggggagtgggggaagcaggcttagtgtgctgagcctcggtccccactgcagacctaaaccccacaccaatcagtcaatctcacacgcatacacaggagcatatttctgtactgatgcataatgaatgcactcacacacacacacacacgccagggggctcccagcactcttctcccagggttcaggactttgtggagtcagcccgtgcagctatttacctctgttgccctgattgcaggtagactgtcaatcccagaagttgctaggtgctgaggcaggaaaaggaggaggtttcttttagcaggtgctctcctctagcaggtagtgttctatctcttttgcccctggtgatgtcaaaagattcttctgttagcaacctgtgatactgacctgcaactctaggcaccagtcaagtcagccctcaactccccctacctattctccccaactgaaatcaaattgacatccaggtctgtcttggccagggggcttccattggggaaaaaaaatgggacagtgaacctcacctattgaataaaccaaattagtaattagtgacaaaaccaaaccaaggctttggaccccctgctcattactcaggagtaaattcacacagctggtggccggtctcacccctttttggggtgcttggtcctggaccccaatctactgtctcctcgacagattggtgtttaagatcatgcccagttgcttcctgtcacctcttgacaggtggtgactgggctgctgtggggctggagcagcgaggaagggagcctctgccccctcagtggagtccctgtgctaactgtggtgctcacccagctcctccttgctcccgcggggctctgtccttcgggcctggagtccaccagcgccactccaggagggctgggggaggaggggctgcctcaggcagtccaaggtgctccctcccccgctggccaatgctaaggtcttcccggctcccagggtcaggacagagtcttctaaggctcaggctctcccaagccactgcttagtgacagttagcctttcccagcggcccaagctccaccggaactgggcctggtgctccaaccaaagggttggtgttgggacttgggaagagacttggtagccaagggcatggcaagcctgggggattcctgtgggccggcttgctcgaggagggagtgctgggcacagaggagcccttatggctgacagcttgagagcacttgttcctccagatctagccacttgaccaggccctagaatggaccagatgccccaggggtcatggcccccccccccccccccttgcagggacgagagttaacaatcaccagcttttcttccggcccagcctgtgtgcttggtctcacagtagaatttaggagagtgtggggctttgggattgtgccaacttggccaagctgagatatgcttaatccacctcaacgctggggcctctggggacaggtattgggtcaccttccaaggggtgctgaacttcagcaggctgtagataaggcagaggttagaggcagtggagtgggggaaccaagaaggcctagggaaaattgccaggcatattccctgtggaattttctttccgaagagtaggcccatttcccccttagaaacaagggttctgggggctgatgacagcttcccctgcaggtgccaggtggcgcatgatgccaaagagatccgtggctcttgcctgggggaggtagccaggtgctcgtgctggggacacagtccttggcctcctgcctaagcaggaagctagtttccagcaggcggctggtactaaccccccgccccacgggagcgacaggctggtgcaccggcagactggggggccgcaggcgggcactagcaggggtctgcagtccatagatgatgacatgaatctgttgctgtccttttgtctctaggccccagagacttcttgctattgaacatcctattggaaagcaaactttccaagagagcacccgggacctgttagcttttgaaacaggcctgggtgtgattgactggtagagatgcctgtgtgatttttggcgcattgcaggagtgtggattgggacaggcaccccagcaggaaggaaggctgacaccaaaggggtctcacagggcccagctccccttgcttcccgataattggccaccaggccatggcgactctggggaagcctagatgggaacacccaccttctccagcagtagaaggaatatttcagcagagccatctgggagatgttcttataggaaaactgcagtcattcatttcatagttttgcttatataaatagagtacatttgggaggcagttttgaattcctgttgctactctgcttggtgcggagttgcagtggccccaagtgtctttcagagctgttgcttttaggatccccctcaagctgtgggttagggccagggcagggagggggtgctgcctggcactgtgccctgaagagggctgcttgcttcctttggtcgggagcacggcagagccaacattctggtgggaaccgagtttctagccaggcccctgttttggtcccgggaggtgagtaatctgagtttgtcattgcgtattctccacgctgcctgctctcagtgctggagactagagagcgaccctggagttgtcctctgggagtcctgcctgtttgccagggagcagctgaaacctccccgctcccaatcccgggggtggaaaaggtgtagtggaggaatggtctggagctgggatggcccttctggccatgccctgctgagccaggattaaggaaagtgtcagccgcctccttaccaggccctgtgctggggtcaggaggaccgggaggagagggaaggggtgagaggatggactctgctgttgtagtgtgagctctggaatctttacgttttggtaaaggcaggccagggtctttgaggatcgagttggggaaccttgcctctgtgtttccgagacccagctaaggtgggcctttggtgggtgacctgtctctgacccgaggcagcagagttttgggggagggagaaacaagcaaggagcagggaggacaaggacacaagatccctttgctggtggtgacttactcacttcccccaccagagggcctgggactcccgaaactcccgtaactggaaagctccctggctcagctccactggggggtgaggagggcggctccctcagccccagcctagcggcctccaaccctgtgcctgagaacatgagcagcggtctaaagcatcccctagtcccatttcacttcacagaccgatttggttgcacagccctagaattcaacagacaacaaaaatgctgaaattccttagaatacgcagagggaggaggtgactcaccaaggtgctaaaacattttattaaaaatatatattgttaaattaagtctgctgtctggacaatgactgtttgttttgttttcttgtagtggagtttaaaagagactattattttactctgatatattattattaaaaaggcattttaactttgtacttgaaaactaaatgagcgatttcatgtgttttagctgaggcattgaagtagcgggtgcttacttatttgtgggaaatcatgtattcatactgaagaataaactccgtagctgatttggtaataacttttactgttacagacgatttcgctttgaccccggtggcagagcacttttactccacattccacgcagctaaatgcaggacttcccagactcttccctccccagccctctttcctttctcttaagttcctcttttctcctttattattattatttttttttcctggttccagcatcctttcaccactgtattttttttttttttttttttttttttttttttttttttttttttttttttttagggttgcttctctatttattgacaataataatgtacatttcacagtctggttctaggacattcagggaagggcgagtgggggcccgaggggtccctgccccacccgcctggtgtcctgttgtatctctgtgtaagtgatgctcgtgacatagctgtttatgaaataattaaagaggtcaatgcgtacaacagatgtagaaagtctgtcagttccgccttcatcacatttttttttgtgcccagaagaatataataaagctcctttctaatgtacttgtgctggagaacacttgaataaatggactgtttttgtgcaaaaagaaaaatggaaaagcaccgtaataa

SEQ ID NO: 30 - DNA, 4048 bp, Homo sapiens
  source 1..4048: mol_type = genomic DNA
cgcagcagctgctcccggctccgcggccgcagcccgcgtggacgctccgagcgccccccgacggacgggaccggctccctggcggtcgggcgagcgggcggcaacgctgcccggccggcagcgctggggttaagtggcccaagtaaacctagctcggcgatcggcgccggagattcgcgagcccagcgccctgcacggccgccagccggcctcccgccagccagccccgacccgcggctccgccgcccagccgcgccccagccagccctgcggcaggaaagcatgaagggagacaccaggcatctcaatggagaggaggacgccggcgggagggaagactcgatcctcgtcaacggggcctgcagcgaccagtcctccgactcgcccccaatcctggaggctatccgcaccccggagatcagaggccgaagatcaagctcgcgactctccaagagggaggtgtccagtctgctaagctacacacaggacttgacaggcgatggcgacggggaagatggggatggctctgacaccccagtcatgccaaagctcttccgggaaaccaggactcgttcagaaagcccagctgtccgaactcgaaataacaacagtgtctccagccgggagaggcacaggccttccccacgttccacccgaggccggcagggccgcaaccatgtggacgagtcccccgtggagttcccggctaccaggtccctgagacggcgggcaacagcatcggcaggaacgccatggccgtcccctcccagctcttaccttaccatcgacctcacagacgacacagaggacacacatgggacgccccagagcagcagtaccccctacgcccgcctagcccaggacagccagcaggggggcatggagtccccgcaggtggaggcagacagtggagatggagacagttcagagtatcaggatgggaaggagtttggaataggggacctcgtgtggggaaagatcaagggcttctcctggtggcccgccatggtggtgtcttggaaggccacctccaagcgacaggctatgtctggcatgcggtgggtccagtggtttggcgatggcaagttctccgaggtctctgcagacaaactggtggcactggggctgttcagccagcactttaatttggccaccttcaataagctcgtctcctatcgaaaagccatgtaccatgctctggagaaagctagggtgcgagctggcaagaccttccccagcagccctggagactcattggaggaccagctgaagcccatgttggagtgggcccacgggggcttcaagcccactgggatcgagggcctcaaacccaacaacacgcaaccagagaacaagactcgaagacgcacagctgacgactcagccacctctgactactgccccgcacccaagcgcctcaagacaaattgctataacaacggcaaagaccgaggggatgaagatcagagccgagaacaaatggcttcagatgttgccaacaacaagagcagcctggaagatggctgtttgtcttgtggcaggaaaaaccccgtgtccttccaccctctctttgagggggggctctgtcagacatgccgggatcgcttccttgagctgttttacatgtatgatgacgatggctatcagtcttactgcactgtgtgctgcgagggccgagagctgctgctttgcagcaacacgagctgctgccggtgtttctgtgtggagtgcctggaggtgctggtgggcacaggcacagcggccgaggccaagcttcaggagccctggagctgttacatgtgtctcccgcagcgctgtcatggcgtcctgcggcgccggaaggactggaacgtgcgcctgcaggccttcttcaccagtgacacggggcttgaatatgaagcccccaagctgtaccctgccattcccgcagcccgaaggcggcccattcgagtcctgtcattgtttgatggcatcgcgacaggctacctagtcctcaaagagttgggcataaaggtaggaaagtacgtcgcttctgaagtgtgtgaggagtccattgctgttggaaccgtgaagcacgaggggaatatcaaatacgtgaacgacgtgaggaacatcacaaagaaaaatattgaagaatggggcccatttgacttggtgattggcggaagcccatgcaacgatctctcaaatgtgaatccagccaggaaaggcctgtatgagggtacaggccggctcttcttcgaattttaccacctgctgaattactcacgccccaaggagggtgatgaccggccgttcttctggatgtttgagaatgttgtagccatgaaggttggcgacaagagggacatctcacggttcctggagtgtaatccagtgatgattgatgccatcaaagtttctgctgctcacagggcccgatacttctggggcaacctacccgggatgaacaggatctttggctttcctgtgcactacacagacgtgtccaacatgggccgtggtgcccgccagaagctgctgggaaggtcctggagcgtgcctgtcatccgacacctcttcgcccctctgaaggactactttgcatgtgaatagttccagccaggccccaagcccactggggtgtgtggcagagccaggacccaggaggtgtgattcctgaaggcatccccaggccctgctcttcctcagctgtgtgggtcataccgtgtacctcagttccctcttgctcagtgggggcagagccacctgactcttgcaggggtagcctgaggtgccgcctccttgtgcacaaatcagacctggctgcttggagcagcctaacacggtgctcattttttcttctcctaaaactttaaaacttgaagtaggtagcaacgtggctttttttttttcccttcctgggtctaccactcagagaaacaatggctaagataccaaaaccacagtgccgacagctctccaatactcaggttaatgctgaaaaatcatccaagacagttattgcaagagtttaatttttgaaaactggctactgctctgtgtttacagacgtgtgcagttgtaggcatgtagctacaggacatttttaagggcccaggatcgttttttcccagggcaagcagaagagaaaatgttgtatatgtcttttacccggcacattccccttgcctaaatacaagggctggagtctgcacgggacctattagagtattttccacaatgatgatgatttcagcagggatgacgtcatcatcacattcagggctattttttcccccacaaacccaagggcaggggccactcttagctaaatccctccccgtgactgcaatagaaccctctggggagctcaggaaggggtgtgctgagttctataatataagctgccatatattttgtagacaagtatggctcctccatatctccctcttccctaggagaggagtgtgaagcaaggagcttagataagacaccccctcaaacccattccctctccaggagacctaccctccacaggcacaggtccccagatgagaagtctgctaccctcatttctcatctttttactaaactcagaggcagtgacagcagtcagggacagacatacatttctcataccttccccacatctgagagatgacagggaaaactgcaaagctcggtgctccctttggagattttttaatccttttttattccataagaagtcgtttttagggagaacgggaattcagacaagctgcatttcagaaatgctgtcataatggtttttaacaccttttactcttcttactggtgctattttgtagaataaggaacaacgttgacaagttttgtggggctttttatacactttttaaaatctcaaacttctatttttatgtttaacgttttcattaaaattttttttgtaactggagccacgacgtaacaaatatggggaaaaaactgtgccttgtttcaacagtttttgctaatttttaggctgaaagatgacggatgcctagagtttaccttatgtttaattaaaatcagtatttgtcta

SEQ ID NO: 31 - DNA, 5537 bp, Homo sapiens
  source 1..5537: mol_type = genomic DNA
gctgagcgccggaggagcgtaggcagggcagcgctggcgccagtggcgacaggagccgcgcgaccggcaaaaatacacgggaggccgtcgccgaaaagagtccgcggtcctctctcgtaaacacactctcctccaccggcgcctccccctccgctctgcgcgccgcccggctgggcgcccgaggccgctccgactgctatgtgaccgcgaggctgcgggaggaaggggacagggaagaagaggctctcccgcgggagcccttgaggaccaagtttgcggccacttctgcaggcgtcccttcttagctctcgcccgcccctttctgcagcctaggcggcccgggttctcttctcttcctcgcgcgcccagccgcctcggttcccggcgaccatggtgacgatggaggagctgcgggagatggactgcagtgtgctcaaaaggctgatgaaccgggacgagaatggcggcggcgcgggcggcagcggcagccacggcaccctggggctgccgagcggcggcaagtgcctgctgctggactgcagaccgttcctggcgcacagcgcgggctacatcctaggttcggtcaacgtgcgctgtaacaccatcgtgcggcggcgggctaagggctccgtgagcctggagcagatcctgcccgccgaggaggaggtacgcgcccgcttgcgctccggcctctactcggcggtcatcgtctacgacgagcgcagcccgcgcgccgagagcctccgcgaggacagcaccgtgtcgctggtggtgcaggcgctgcgccgcaacgccgagcgcaccgacatctgcctgctcaaaggcggctatgagaggttttcctccgagtacccagaattctgttctaaaaccaaggccctggcagccatcccacccccggttccccccagtgccacagagcccttggacctgggctgcagctcctgtgggaccccactacacgaccaggggggtcctgtggagatccttcccttcctctacctcggcagtgcctaccatgctgcccggagagacatgctggacgccctgggcatcacggctctgttgaatgtctcctcggactgcccaaaccactttgaaggacactatcagtacaagtgcatcccagtggaagataaccacaaggccgacatcagctcctggttcatggaagccatagagtacatcgatgccgtgaaggactgccgtgggcgcgtgctggtgcactgccaggcgggcatctcgcggtcggccaccatctgcctggcctacctgatgatgaagaaacgggtgaggctggaggaggccttcgagttcgttaagcagcgccgcagcatcatctcgcccaacttcagcttcatggggcagctgctgcagttcgagtcccaggtgctggccacgtcctgtgctgcggaggctgctagcccctcgggacccctgcgggagcggggcaagacccccgccacccccacctcgcagttcgtcttcagctttccggtctccgtgggcgtgcactcggcccccagcagcctgccctacctgcacagccccatcaccacctctcccagctgttagagccgccctgggggccccagaaccagagctggctcccagcaagggtaggacgggccgcatgcgggcagaaagttgggactgagcagctgggagcaggcgaccgagctccttccccatcatttctccttggccaacgacgaggccagccagaatggcaataaggactccgaatacataataaaagcaaacagaacactccaacttagagcaataacggctgccgcagcagccagggaagaccttggtttggtttatgtgtcagtttcacttttccgatagaaatttcttacctcatttttttaagcagtaaggcttgaagtgatgaaacccacagatcctagcaaatgtgcccaaccagctttactaaagggggaggaagggagggcaaagggatgagaagacaagtttcccagaagtgcctggttctgtgtacttgtccctttgttgtcgttgttgtagttaaaggaatttcattttttaaaagaaatcttcgaaggtgtggttttcatttctcagtcaccaacagatgaataattatgcttaataataaagtatttattaagactttcttcagagtatgaaagtacaaaaagtctagttacagtggatttagaatatatttatgttgatgtcaaacagctgagcaccgtagcatgcagatgtcaaggcagttaggaagtaaatggtgtcttgtagatatgtgcaaggtagcatgatgagcaacttgagtttgttgccactgagaagcaggcgggttgggtgggaggaggaagaaagggaagaattaggtttgaattgctttttaaaaaaaaaagaaaagaaaaagacagcatctcactatgttgccaaggctcatcttgagaagcaggcgggttgggtgggaggaggaagaaagggaagaattaggtttgaattgcttttttaaaaaaaaagaaaagaaaaaaaaagacagcatctcactatgttgccaaggctcatctcaagctcttgggctcaagagatcctcccacctcggcctcctgagtagctgggactgcaggtgtgtgtcatcatgaccaatgtgaattgcttttgaagctggttcatgggcatgtaggccaccgaagcaattttagaccacagtaagtcaagcttttttccctccgatgatcactgggtggttgcagcattttttgcataaacctgcctaagacttgtctatcgtctgtgatcaatatgccatattacactaaggtgctcctggaaaattgggtgcagttcaaattttcctacagcaaatcatttggcaaggccagccattggggaaaccagacaactagagataaccctgaaatgaatccttttgtaaattgaagcaccatcttttctttttttgcataaattggaggttttaattttagggcagttacctgaagtgaaatataccaacaatttcttgtgttctttaaattcctagttaggtgaatatttttgaaggtcctcttttgaataaagaggggaatggacaccacatttcaggtcttctcgaagtgtggaagggcaagagagcatcagtgagctgatggtggattgcttacatcggattccattggtatgaatttcccaaactggaaatcaaagcgccagggtggggttggggctgactgctggtgagggggctggccgctggctcccgtgacgtgcgtcatgggcacgcaggcgccattttgaatctatcgtcggcacgtgggtgccattttgaatccttagttgggcctttctaaatggagaatggctttggagggagacacgttttctgtggggagggtttgggggggagggaggagggaacaagctacatgctattttgtttgtagtattgtggaacagtcttgttatggagtgccagcttagaggttgttgcaaacttgtctagaagtgagagcatggttttttttagccctttgagagtctacatctaatgaacattcttgctcacccataaataacgtcaagcctcaatgtcaccgtcacgttgggatactctttctcatctggcatcctagacaggacaaggttggttacctttccttccatgaaccatgaacctgtgacggcatcattcatcctgacttcaccaagctccgcctgtgggtgaggccagagctcccactggcaatttttagaagagccagaggctccctgcttcctctagaaataacagttcagggtgaagcatggagggtttcagttcccagacaatggaaccatttagagacaacacagttggacatttccactttttccttgattcctggaagtccagtgggttctgcagctgaaaaagccctgggtcccagcagcagagagacaggacagaggggatgcttgggcggggagggacggtaacctgcagaacagattccatttttatagaacgagtacacgtttgctaaaacagtcctgctttcccagactggattcccaccacagggacagtcggaactcaggactagctccagcgacatctttcctccgaattcaagccttctatcacaatgtcaaaacagctatttataaagccattttcattgtacttgataacagcacgagtcccaaaacttttagaaataaaataggacattggcttgattgaaaagagggactttttaaaaattgttctttcgtcagaagccttttggatgacttacaatagctctgatgaagataccaccccagcgtcagtccaataggtcagtgagtttcaacaggcatccatccctcccatgaagggattctggtgatgggaagtttctgtaatgacaggaaagcattgaccctcattgattgtcaactttggtattagccatgaaagacaggatgctcattgggtgttctgtagagtgaggaatgctgcctattccctcccagaacgtctgacccaggggtgtgtgttgaggagccctgggggaaatggaccaagttttcccacagagcagtattaggctgaagagcaggtgactggtaggccccagctcccatcattccctcccaaagccattttgttcagttgctcatccacgctggattccagagagttttccaatttgggaagccatgagaaaggtttttaaatcttgggaagatggagagagggacataggatagttgactccaacatgacaggaagaggctggagattgggaattggccatcaaccaagcctgtagtagtaaagccatggtcccgcattggaattacttggggaacttatacagttctgatacccaggctctcctagaccagttcaaccaattctaggtgggggactcaggcatcagtgtgtttcgtagctccccgggtgttttccctgtgcagccgagcttgggaaactgccatgctttttggatgtcaaggcgctgttggaggctgggtgtgacagcacagagccaggttgtcttgtggaaaccacagccacgggtttgccactggctcagcatggcctcactgccagtcccagcctggctgagggacaagatggtttctcttgggagttcctgagtggagcacccttccaggctttttgaaagccagctgatctgtggagccttgttaagggactcaatacggtgtttggatattgatgtttttccttgagactgtcttgtccatcaataaagatggaggatgtctcctctttgaaccccgcttccccaccagtactctctctcccttagagtttatgagttattcaaggaggagacttcttaaagacagcaacgcaattcttgtaacttgtgtaaatagccccatctttcagagtgataccatttctacatttgataatgcctgtattcctgtaggatgtatatagtttaggggattttttttttgtttggttttgttttttagaagtcaatatgtctggttttatttattgcttgaaaaagatcatttgaaaaaaataaatacattttcaacca

SEQ ID NO: 32 - DNA, 1696 bp, Homo sapiens
  source 1..1696: mol_type = genomic DNA
gaggaatatgtccgagagggaagtgtcgactgcgccggcgggaacagacatgcctgcggccaagaagcagaagctgagcagtgacgagaacagcaatccagacctctctggagacgagaatgatgacgctgtcagtatagaaagtggtacaaacactgaacgccctgatacacctacaaacacgccaaatgcacctggaaggaaaagttggggaaagggaaaatggaagtcaaagaaatgcaaatattctttcaaatgtgtaaatagtctcaaggaagatcataaccaaccattgtttggagttcagtttaactggcacagtaaagaaggagatccattagtgtttgcaactgtaggaagcaacagagttaccttgtatgaatgtcattcacaaggagaaatccggttgttgcaatcttacgtggatgctgatgctgatgaaaacttttacacttgtgcatggacctatgatagcaatacgagccatcctctgctggctgtagctggatctagaggcataattaggataataaatcctataacaatgcagtgtataaagcactatgttggccatggaaatgctatcaatgagctgaaattccatccaagagatccaaatcttctcctgtcagtaagtaaagatcatgctttacgattatggaatatccagacggacactctggtggcaatatttggaggcgtagaagggcacagagatgaagttctaagtgctgattatgatcttttgggtgaaaaaataatgtcctgtggtatggatcattctcttaaactttggaggatcaattcaaagagaatgatgaatgcaattaaggaatcttatgattataatccaaataaaactaacaggccatttatttctcagaaaatccattttcctgatttttctaccagagacatacataggaattatgttgattgtgtgcgatggttaggcgatttgatactttctaagagtggccgtgccattttacattcccaccagcaatgtatgagagatccagtgtctccgaatcttcgccagcatttgtcttgtgaaaatgccattgtgtgctggaaacctggcaagatggaagatgatatagataaaattaaacccagtgaatctaatgtgactattcttgggcgatttgattacagccagtgtgacatttggtacatgaggttttctatggatttctggcaaaagatgcttgcattgggcaatcaagttggcaaactttatgtttgggatttagaagtagaagatcctcataaagccaaatgtacaacactgactcatcataaatgtggtgctgctattcgacaaaccagttttagcagggatagcagcattcttatagctgtttgtgatgatgccagtatttggcgctgggatcgacttcgataaaatacttttgcctaatcaaaattagagtgtgtttgttgtctgtgtaaaatagaattaatgtatcttgctagtaagggcacgtagagcatttagagttgtctttcagcattcaatcaggctgagctgaatgtagtgatgtttacattgtttacattctttgtactgtcttcctgctcagactctactgcttttaataaaaatttatttttgtaaagctgtgtgtttagttactttcattgtggtgaaaaaaagttaaaagtaataaaattatgccttatctttttataa

SEQ ID NO: 33 - DNA, 582 bp, Homo sapiens
  source 1..582: mol_type = genomic DNA
gctgcgccggcgcgtcgaggggagaggcagcagccgcgatggacgtgttcctcatgatccggcgccacaagaccaccatcttcacggacgccaaggagtccagcacggtgttcgaactgaagcgcatcgtcgagggcatcctcaagcggcctcctgacgagcagcggctgtacaaggatgaccaactcttggatgatggcaagacactgggcgagtgtggcttcaccagtcaaacagcacggccacaggccccagccacagtggggctggccttccgggcagatgacacctttgaggccctgtgcatcgagccgttttccagcccgccagagctgcccgatgtgatgaagccccaggactcgggaagcagtgccaatgaacaagccgtgcacctgcatgtccactcccagacgatggccaagagcagaaacacaagctggagccagtgtcctggtttgacagcatgttcaacgagggaaccccaagacggacccacacaggtccacccacgctgggggctgtaatcacggagggaagtggctgcccccttaacacacctttaataaacagtctacagaccca

SEQ ID NO: 34 - DNA, 5044 bp, Homo sapiens
  source 1..5044: mol_type = genomic DNA
gtgtacgtgtaaaattatgatcaaataaatttgtatgccttttctcctattaacctgccttttttgtcagcgattgtcagtgaaacttcagagggcaaaggggaagttttccttggcccctccagttttggtgctgtgaacaggataccaaagctgctctgttcttctggaagctgcaatgaagggaaccaaggacctgacaagccagcagaaggagtctaacgtgaagacattttgctccaagaatatcctagccatccttggcttctcctctatcatagctgtgatagctttgcttgctgtggggttgacccagaacaaagcattgccagaaaacgttaagtatgggattgtgctggatgcgggttcttctcacacaagtttatacatctataagtggccagcagaaaaggagaatgacacaggcgtggtgcatcaagtagaagaatgcagggttaaaggtcctggaatctcaaaatttgttcagaaagtaaatgaaataggcatttacctgactgattgcatggaaagagctagggaagtgattccaaggtcccagcaccaagagacacccgtttacctgggagccacggcaggcatgcggttgctcaggatggaaagtgaagagttggcagacagggttctggatgtggtggagaggagcctcagcaactacccctttgacttccagggtgccaggatcattactggccaagaggaaggtgcctatggctggattactatcaactatctgctgggcaaattcagtcagaaaacaaggtggttcagcatagtcccatatgaaaccaataatcaggaaacctttggagctttggaccttgggggagcctctacacaagtcacttttgtaccccaaaaccagactatcgagtccccagataatgctctgcaatttcgcctctatggcaaggactacaatgtctacacacatagcttcttgtgctatgggaaggatcaggcactctggcagaaactggccaaggacattcaggttgcaagtaatgaaattctcagggacccatgctttcatcctggatataagaaggtagtgaacgtaagtgacctttacaagaccccctgcaccaagagatttgagatgactcttccattccagcagtttgaaatccagggtattggaaactatcaacaatgccatcaaagcatcctggagctcttcaacaccagttactgcccttactcccagtgtgccttcaatgggattttcttgccaccactccagggggattttggggcattttcagctttttactttgtgatgaagtttttaaacttgacatcagagaaagtctctcaggaaaaggtgactgagatgatgaaaaagttctgtgctcagccttgggaggagataaaaacatcttacgctggagtaaaggagaagtacctgagtgaatactgcttttctggtacctacattctctccctccttctgcaaggctatcatttcacagctgattcctgggagcacatccatttcattggcaagatccagggcagcgacgccggctggactttgggctacatgctgaacctgaccaacatgatcccagctgagcaaccattgtccacacctctctcccactccacctatgtcttcctcatggttctattctccctggtccttttcacagtggccatcataggcttgcttatctttcacaagccttcatatttctggaaagatatggtatagcaaaagcagctgaaatatgctggctggagtgaggaaaaaaatcgtccagggagcattttcctccatcgcagtgttcaaggccatccttccctgtctgccagggccagtcttgacgagtgtgaagcttccttggcttttactgaagcctttcttttggaggtattcaatatcctttgcctcaaggacttcggcagatactgtctctttcatgagtttttcccagctacacctttctcctttgtactttgtgcttgtataggttttaaagacctgacacctttcataatctttgctttataaaagaacaatattgactttgtctagaagaactgagagtcttgagtcctgtgataggaggctgagctggctgaaagaagaatctcaggaactggttcagttgtactctttaagaacccctttctctctcctgtttgccatccattaagaaagccatatgatgcctttggagaaggcagacacacattccattcccagcctgctctgtgggtaggagaattttctacagtaggcaaatatgtgctaaagccaaagagttttataaggaaatatatgtgctcatgcagtcaatacagttctcaatcccacccaaagcaggtatgtcaataaatcacatattcctaggtgatacccaaatgctacagagtggaacactcagacctgagatttgcaaaaagcagatgtaaatatatgcattcaaacatcagggcttactatgaggtaggtggtatatacatgtcacaaataaaaatacagttacaactcagggtcacaaaaaatgcatcttccaatgcatatttttattatggtaaaatatacataaatataattcaccattttaacatttaattcatattaaatacgtacaaatcagtgacatttagtacattcacagtgttgtgccaccatcaccactatttagttccagaacatttgcatcatcaatacattgtctagagacaagactatcctgggtaggcagaaaccatagatcttttgtgtttacagctatggaaaccaactgtaccataaagatagttcactgagttttaaagccaagccacatcttatttttccaaggtttaatttagtgagagggcagcattagtgtggagtggcatgcttttgccctatcgtggaatttacacatcagaatgtgcaggatccaagtctgaaagtgttgccacccgtcacacaacatgggctttgtttgcttattccatgaagcagcagctatagaccttaccatggaaacatgaagagaccctgcacccctttccttaaggattgctgcaagagttacctgttgagcaggattgactggtgatgtttcattctgaccttgtcccaagctctccatctctagatctggggactgactgttgagctgatggggaaagaaaagctctcacacaaaccggaagccaaatgtcccctatctcttgaatgatcaagtcacttttgacaacatccaggtgaatataaaaacttaataaagctgtggaaaggaactcttaatcttcttttctgctacttaggttaaattcactagatcttgattaggaatcaaaattcgaattgggacatgttcaaattctttcttgtggtagttgcctatactgtcatcgctgctgttggttgagcatttgtggtgtaccacgctgtgtgctcaagggtattacattcatcttctcatttaatcctcacaacaatctgaagaaggtaggtattacaattcccacttcatagaaacagaaactgaggttcagagaggttaagtcatttgcccaaatggctgagccaaagcctaccatgtacctaacctttattttctttcccgaacataccaggctgtctcctcataacttccaagcatgcacttaaaactccacatgaatacaaggttcatgggacttggtattcatagaaagggaggcagaaagctggtctgttcctgataggcttgtaatttaatatcattctgttcatgtgctttggatggaagcacatctggcatatgatgctaatcagtggttcccatacccctggcttcctaattttaatgtttgctcacagcatagtagattgacatcaaatagtggccgatgatgatgaaaataaaggtcaaataagttgagccaataacagccgcttttttccttctgtctgcgtatacaaagcactgtcatgcacacaatctattctgaccctcacaacaacccataagggtgtaaatagtatttccattttacaaatgaggatcacacaaactactacatggcagagcagatactccaactcatgtcttctggttgaagcctattgctttttcttttctaaacactttccctcagcaagttggaattagacttcacaagtctccttcagagaacacaaatcttttcttattccattcctgtttggttgcctacgtccaatctccccctccccagagatgccaaaaaaaaaatcctttaaggtatttgggagccaaactcaacttgttaaaatctcaaattatggagacaatcagcagacacaacctaaccccaattattttggcaggaaggttggtttagaggcagatccagcaatctgctttgggccactctgggtggggtaggtgaaataagattggtcactgttaactaattttaatattggattggccattggttatcactgattaccattctcccctggattttcacccaggactcaaaacttggttctgctaaccctgttcctttatgaggaaccttttaaagattcctttataaggtgggagttttttttctatgaacctataggggagaaaaaagatcagcagaagtcattacttttttttttttttttttttttttttgagagagagtctcactccattgcccaggctggagtgcagtggtgctatctcggctcactgcaacctccgcctcctgggttcaagcaattctcctgcctcagcctcccgagtagctgggattgcaggtgcccaccaccacacccggctaatttttgtatttttagtaaagacagggtttcaccatgttggccaggctggtctccaactcccaatctcaggtgatcctattgcctcgggctcccaaagtgctgggattacaggagtgagccaccatgcctggccagaagtggttacttctgtagacaaaagaataatgctacttaatcaggctttctgtgtgacaagaaagagaaagaaaataaagaagtttcaattcatccaattcttaataagaaatatgtaaataaaattttttaaaattacacttc

SEQ ID NO: 35 - DNA, 3386 bp, Homo sapiens
  source 1..3386: mol_type = genomic DNA
tttccttccggaaaggacgctggattcagggcgcgccagtacgcgcagtagcggcccgcgagtcggcaggtgggtagccccggcgcgggaggaaggggaagttaccttcccctcggaagagggcgctggctcccccatcctgcctttataataaggccaccggaggagaggaagcagccagctgccgtctgcgctttgcaaagcatgcagttaggggagcagctcttggtgagctcagtgaacctgcctggcgcgcacttctacccgctggagagtgcgcgaggcggcagcggcgggagcgctggccacctccccagcgcggccccctctcctcagaagttggacttagacaaagcgtccaagaagttttccggcagtctctcctgcgaggcggtgagcggggagcccgcagccgccagcgcaggggcccccgcggccatgcttagtgacaccgacgccggggacgcatttgccagcgctgcggcagtggccaagccggggcccccggacggccgcaagggctccccctgcggggaggaggagctgccctccgccgctgcagccgccgccgccgccgccgccgcggctgcggccactgcgcgctactccatggacagcctgagctccgagcggtactacctccagtcccccggtcctcaggggtcggagctggctgcgccctgctcactcttcccgtaccaggcggcggctggggcgccccacggacctgtgtacccggctcctaacggggcgcgctacccctacggctccatgctgccccccggcggcttccccgcggctgtgtgcccacccgggagggcgcagttcggcccaggagccggtgcgggcagtggcgcgggcggtagcagcggcgggggcggcggcccgggcacctatcagtacagccagggggctccgctctacgggccgtaccctggagccgcagcggcgggatcttgcggaggactggggggcctgggggttccaggttctggcttccgtgcccacgtctacctgtgcaaccggcctctgtggctcaaattccaccgccaccaaactgagatgatcattacgaaacagggcaggcgcatgtttcctttcttgagcttcaacataaacggactcaatcccactgcccactacaatgtgttcgtagaggtggtgctggcggaccccaaccactggcgcttccaggggggcaaatgggtgacctgtggcaaagccgacaataacatgcagggcaacaaaatgtatgttcacccagagtctcctaatactggttcccactggatgagacaggagatttcattcgggaaattaaaactcaccaataacaaaggcgcaaataacaacaacacccagatgatagtcttacaatccttacacaaataccaaccccgactgcatattgttgaagttacagaggatggcgtggaggacttgaatgagccctcaaagacccagacttttaccttctcagaaacgcaattcattgcagtgactgcctaccaaaacaccgatattactcaactaaagattgatcataacccctttgcaaaaggcttcagagacaactatgattcatcccatcagattgtccctggaggtcggtacggcgttcaatccttcttcccggagccctttgtcaacactttacctcaagcccgctattataatggcgagagaaccgtgccacagaccaacggcctcctttcaccccaacagagcgaagaggtggccaaccctccccagcggtggcttgtcacgcctgtccagcaacctgggaccaacaaactagacatcagttcctatgaatctgaatatacttctagcacattgctcccatatggcattaaatccttgccccttcagacatcccatgccctggggtattacccagacccaacctttcctgcaatggcagggtggggaggtcgaggttcttaccagaggaagatggcagctggactaccatggacctccagaacaagccccactgtgttctctgaagatcagctctccaaggagaaagtgaaagaggaaattggctcttcttggatagagacacccccttccatcaaatctctagattccaatgattcaggagtatacaccagtgcttgtaagcgaaggcggctgtctcctagcaactccagtaatgaaaattcaccctccataaagtgtgaggacattaatgctgaagagtatagtaaagacacctcaaaaggcatgggagggtattatgctttttacacaactccctaaagagttattttaacctcaaaaattagctaactttttgcagatggacttggtggtgttttttgttgtcttctttgcctaggttgccaaaaagatgtttgccttccaccttgatgcatcctgttttgtgcaattctctaaaagaaggtgccaaagctttttgattgctgcaggtaactgaaacaaacctagcatttttaaaaaataagattaatggaagactttaaggtattttaaaattcgaagggtatccaaggttctgtatttatttattggggagacactaacccttcaaagaagcaggctgtgaacattgggtgcccagtgctatcagatgagttaaaacctttgattctcatttctatttgtaaattcttaagcaaatagaagccgagtgttaaggtgttttgcttctgaaagagggctgtgccttccgtttcagaaggagacattttgctgttacattctgccaggggcaaaagatactaggcccaggagtcaagaaaagcttttgtgaaagtgatagtttcacctgactttgattccttaacccccggcttttggaacaagccatgtttgccctagtccaggattgcctcacttgagacttgctaggcctctgctgtgtgctggggtggccagtgggactcaggagagagcaagctaaggagtcaccaaaaaaaaaaaaaaaaaaaagggagaatttaaaagtgtacagttgtgtgtttagatacactatagaataatgtggtatatattgtacaaatagtctacataggtgtctgggataatgtaaaactggtgctttggctttgtaaagaatttgcaaatcacttaacagctgcaggggcaaggggagagtttcatcatccccatgatatttgggaatattctgtttacttcttagatagttaagaatgtattcagctactatgtactaacttgaaccgtgtttaaggaaaactcctatttcatcctcttcttgcgccatcccctctccctaacttggtaatgtgaagaaactaaaacctgataccacagctcctataggcattttagagatcttggatttttatgtacagtcttagtcatttttaataaatgtggttcagtaagggaacgga

SEQ ID NO: 36 - DNA, 5166 bp, Homo sapiens
  source 1..5166: mol_type = genomic DNA
gctttacactcgcgagcggaccgccacacgggtccggtgcccgctgcgcttccgccccagcgctcctgaggcggccgtacaatcctcggcagtgtcctgagactgtatggtcagctcagcccggcctccgactccttccgactcccagcattcgagccacttttttttttctttgaaaactcagaaaagtgactccttttccagggaaaaaggaacttgggttcccttctctccgtcctcttttcgggtctgacagcctccacccactccttccccggaccccgcctccgcgcgcaggttcctcccagtcacctttctccacccccgcccccgcacctagcccgccgcgcgccaccttccacctgactgcgcggggcgctcgggacctgcgcgcacctcggaccttcaccacccgcccgggccgcggggagcggacgagggccacagccccccacccgccagggagcccaggtgctcggcgtctgaacgtctcaaagggccacagcgacaatgacagctgacaaggagaagaaaaggagtagctcggagaggaggaaggagaagtcccgggatgctgcgcggtgccggcggagcaaggagacggaggtgttctatgagctggcccatgagctgcctctgccccacagtgtgagctcccatctggacaaggcctccatcatgcgactggcaatcagcttcctgcgaacacacaagctcctctcctcagtttgctctgaaaacgagtccgaagccgaagctgaccagcagatggacaacttgtacctgaaagccttggagggtttcattgccgtggtgacccaagatggcgacatgatctttctgtcagaaaacatcagcaagttcatgggacttacacaggtggagctaacaggacatagtatctttgacttcactcatccctgcgaccatgaggagattcgtgagaacctgagtctcaaaaatggctctggttttgggaaaaaaagcaaagacatgtccacagagcgggacttcttcatgaggatgaagtgcacggtcaccaacagaggccgtactgtcaacctcaagtcagccacctggaaggtcttgcactgcacgggccaggtgaaagtctacaacaactgccctcctcacaatagtctgtgtggctacaaggagcccctgctgtcctgcctcatcatcatgtgtgaaccaatccagcacccatcccacatggacatccccctggatagcaagaccttcctgagccgccacagcatggacatgaagttcacctactgtgatgacagaatcacagaactgattggttaccaccctgaggagctgcttggccgctcagcctatgaattctaccatgcgctagactccgagaacatgaccaagagtcaccagaacttgtgcaccaagggtcaggtagtaagtggccagtaccggatgctcgcaaagcatgggggctacgtgtggctggagacccaggggacggtcatctacaaccctcgcaacctgcagccccagtgcatcatgtgtgtcaactacgtcctgagtgagattgagaagaatgacgtggtgttctccatggaccagactgaatccctgttcaagccccacctgatggccatgaacagcatctttgatagcagtggcaagggggctgtgtctgagaagagtaacttcctattcaccaagctaaaggaggagcccgaggagctggcccagctggctcccaccccaggagacgccatcatctctctggatttcgggaatcagaacttcgaggagtcctcagcctatggcaaggccatcctgcccccgagccagccatgggccacggagttgaggagccacagcacccagagcgaggctgggagcctgcctgccttcaccgtgccccaggcagctgccccgggcagcaccacccccagtgccaccagcagcagcagcagctgctccacgcccaatagccctgaagactattacacatctttggataacgacctgaagattgaagtgattgagaagctcttcgccatggacacagaggccaaggaccaatgcagtacccagacggatttcaatgagctggacttggagacactggcaccctatatccccatggacggggaagacttccagctaagccccatctgccccgaggagcggctcttggcggagaacccacagtccaccccccagcactgcttcagtgccatgacaaacatcttccagccactggcccctgtagccccgcacagtcccttcctcctggacaagtttcagcagcagctggagagcaagaagacagagcccgagcaccggcccatgtcctccatcttctttgatgccggaagcaaagcatccctgccaccgtgctgtggccaggccagcacccctctctcttccatggggggcagatccaatacccagtggcccccagatccaccattacattttgggcccacaaagtgggccgtcggggatcagcgcacagagttcttgggagcagcgccgttggggccccctgtctctccaccccatgtctccaccttcaagacaaggtctgcaaagggttttggggctcgaggcccagacgtgctgagtccggccatggtagccctctccaacaagctgaagctgaagcgacagctggagtatgaagagcaagccttccaggacctgagcgggggggacccacctggtggcagcacctcacatttgatgtggaaacggatgaagaacctcaggggtgggagctgccctttgatgccggacaagccactgagcgcaaatgtacccaatgataagttcacccaaaaccccatgaggggcctgggccatcccctgagacatctgccgctgccacagcctccatctgccatcagtcccggggagaacagcaagagcaggttccccccacagtgctacgccacccagtaccaggactacagcctgtcgtcagcccacaaggtgtcaggcatggcaagccggctgctcgggccctcatttgagtcctacctgctgcccgaactgaccagatatgactgtgaggtgaacgtgcccgtgctgggaagctccacgctcctgcaaggaggggacctcctcagagccctggaccaggccacctgagccaggccttctacctgggcagcacctctgccgacgccgtcccaccagcttcactctctccgtctgtttttgcaactaggtatttctaacgccagcacactatttacaagatggacttacctggcagacttgcccaggtcaccaagcagtggcctttttctgagatgctcactttattatccctatttttaaagtacacaattgttttacctgttctgaaatgttcttaaattttgtaggatttttttcctccccaccttcaatgacttctaatttatattatccataggtttctctccctccttctccttctcacacacaactgtccatactaacaagtttggtgcatgtctgttcttctgtagggagaagctttagcttcattttactaaaaagattcctcgttattgttgttgccaaagagaaacaaaaatgattttgctttccaagcttggtttgtggcgtctccctcgcagagcccttctcgtttcttttttaaactaatcaccatattgtaaatttcagggtttttttttttttgtttaagctgactctttgctctaattttggaaaaaaagaaatgtgaagggtcaactccaacgtatgtggttatctgtgaaagttgcacagcgtggcttttcctaaactggtgtttttcccccgcatttggtggattttttattattattcaaaaacataactgagttttttaaaagaggagaaaatttatatctgggttaagtgtttatcatatatatgggtactttgtaatatctaaaaacttagaaacggaaatggaatcctgctcacaaaatcactttaagatcttttcgaagctgttaatttttcttagtgttgtggacactgcagacttgtccagtgctcccacggcctgtacggacactgtggaaggcctccctctgtcggctttttgccatctgtgatatgccataggtgtgacaatccgagcagtggagtcattcagcgggagcactgcgcgctatcccctcacattctctatgtactatgtatgtatgtattattattattgctgccaagagggtctgatggcacgttgtggggtcggggggtggggcggggaagtgctctaacttttcttaaggttttgttgctagcccttcaagtgcactgagctatgtgactcggatggtctttcacacggcacatttggacatttccagaactaccatgagatggtttagacgggaattcatgcaaatgaggggtcaaaaatggtatagtgaccccgtccacgtcctccaagctcacgaccttggagccccgtggagctggactgaggaggaggctgcacagcgggagagcagctggtccagaccagccctgcagcccccactcagccggcagccagatggccccgcaaggcctccagggatggcccctagccacaggccctggctgaggtctctgggtcggtcagtgacatgtaggtaggaagcactgaaaatagtgttcccagagcactttgcaactccctgggtaagagggacgacacctctggtttttcaataccaattacatggaacttttctgtaatgggtacaatgaagaagtttctaaaaacacacacaaagcacattgggccaactatttagtaagcccggatagacttattgccaaaaacaaaaaatagctttcaaaagaaatttaagttctatgagaaattccttagtcatggtgttgcgtaaatcatattttagctgcacggcattaccccacacagggtggcagaacttgaagggttactgacgtgtaaatgctggtatttgatttcctgtgtgtgttgccctggcattaagggcattttacccttgcagttttactaaaacactgaaaaatattccaagcttcatattaaccctacctgtcaacgtaacgatttcatgaacgttattatattgtcgaattcctactgacaacattataactgtatgggagcttaactttataaggaaatgtattttgacactggtatcttattaaagtattctgatcctaccactg

SEQ ID NO: 37 - DNA, 4651 bp, Homo sapiens
  source 1..4651: mol_type = genomic DNA
aaagcaagacaaatgactcacagagaaaaaagatggcagaaccaagggcaactaaagccgtcaggttctgaacagctggtagatgggctggcttactgaaggacatgattcagactgtcccggacccagcagctcatatcaaggaactctcctgatgaatgcagtgtggccaaaggcgggaagatggtgggcagcccagacaccgttgggatgaactacggcagctacatggaggagaagcacatgccacccccaaacatgaccacgaacgagcgcagagttatcgtgccagcagatcctacgctatggagtacagaccatgtgcggcagtggctggagtgggcggtgaaagaatatggccttccagacgtcaacatcttgttattccagaacatcgatgggaaggaactgtgcaagatgaccaaggacgacttccagaggctcacccccagctacaacgccgacatccttctctcacatctccactacctcagagagactcctcttccacatttgacttcagatgatgttgataaagccttacaaaactctccacggttaatgcatgctagaaacacagatttaccatatgagccccccaggagatcagcctggaccggtcacggccaccccacgccccagtcgaaagctgctcaaccatctccttccacagtgcccaaaactgaagaccagcgtcctcagttagatccttatcagattcttggaccaacaagtagccgccttgcaaatccaggcagtggccagatccagctttggcagttcctcctggagctcctgtcggacagctccaactccagctgcatcacctgggaaggcaccaacggggagttcaagatgacggatcccgacgaggtggcccggcgctggggagagcggaagagcaaacccaacatgaactacgataagctcagccgcgccctccgttactactatgacaagaacatcatgaccaaggtccatgggaagcgctacgcctacaagttcgacttccacgggatcgcccaggccctccagccccaccccccggagtcatctctgtacaagtacccctcagacctcccgtacatgggctcctatcacgcccacccacagaagatgaactttgtggcgccccaccctccagccctccccgtgacatcttccagtttttttgctgccccaaacccatactggaattcaccaactgggggtatataccccaacactaggctccccaccagccatatgccttctcatctgggcacttactactaaagacctggcggaggcttttcccatcagcgtgcattcaccagcccatcgccacaaactctatcggagaacatgaatcaaaagtgcctcaagaggaatgaaaaaagctttactggggctggggaaggaagccggggaagagatccaaagactcttgggagggagttactgaagtcttactacagaaatgaggaggatgctaaaaatgtcacgaatatggacatatcatctgtggactgaccttgtaaaagacagtgtatgtagaagcatgaagtcttaaggacaaagtgccaaagaaagtggtcttaagaaatgtataaactttagagtagagtttggaatcccactaatgcaaactgggatgaaactaaagcaatagaaacaacacagttttgacctaacataccgtttataatgccattttaaggaaaactacctgtatttaaaaatagaaacatatcaaaaacaagagaaaagacacgagagagactgtggcccatcaacagacgttgatatgcaactgcatggcatgtgctgttttggttgaaatcaaatacattccgtttgatggacagctgtcagctttctcaaactgtgaagatgacccaaagtttccaactcctttacagtattaccgggactatgaactaaaaggtgggactgaggatgtgtatagagtgagcgtgtgattgtagacagaggggtgaagaaggaggaggaagaggcagagaaggaggagaccagggctgggaaagaaacttctcaagcaatgaagactggactcaggacatttggggactgtgtacaatgagttatggagactcgagggttcatgcagtcagtgttataccaaacccagtgttaggagaaaggacacagcgtaatggagaaaggggaagtagtagaattcagaaacaaaaatgcgcatctctttctttgtttgtcaaatgaaaattttaactggaattgtctgatatttaagagaaacattcaggacctcatcattatgtgggggctttgttctccacagggtcaggtaagagatggccttcttggctgccacaatcagaaatcacgcaggcattttgggtaggcggcctccagttttcctttgagtcgcgaacgctgtgcgtttgtcagaatgaagtatacaagtcaatgtttttccccctttttatataataattatataacttatgcatttatacactacgagttgatctcggccagccaaagacacacgacaaaagagacaatcgatataatgtggccttgaattttaactctgtatgcttaatgtttacaatatgaagttattagttcttagaatgcagaatgtatgtaataaaataagcttggcctagcatggcaaatcagatttatacaggagtctgcatttgcactttttttagtgactaaagttgcttaatgaaaacatgtgctgaatgttgtggattttgtgttataatttactttgtccaggaacttgtgcaagggagagccaaggaaataggatgtttggcacccaaatggcgtcagcctctccaggtccttcttgcctcccctcctgtcttttatttctagccccttttggaacagaaggaccccgggtttcacattggagcctccatatttatgcctggaatggaaagaggcctatgaagctggggttgtcattgagaaattctagttcagcacctggtcacaaatcacccttaattcctgctatgattaaaatacatttgttgaacagtgaacaagctaccactcgtaaggcaaactgtattattactggcaaataaagcgtcatggatagctgcaatttctcactttacagaaacaagggataacgtctagatttgctgcggggtttctctttcaggagctctcactaggtagacagctttagtcctgctacatcagagttacctgggcactgtggcttgggattcactagccctgagcctgatgttgctggctatcccttgaagacaatgtttatttccataatctagagtcagtttccctgggcatcttttctttgaatcacaaatgctgccaaccttggtccaggtgaaggcaactcaaaaggtgaaaatacaaggtgaccgtgcgaaggcgctagccgaaacatcttagctgaataggtttctgaactggcccttttcatagctgtttcagggcctgtttttttcacgttgcagtccttttgctatgattatgtgaagttgccaaacctctgtgctgtggatgttttggcagtgggctttgaagtcggcaggacacgattaccaatgctcctgacaccccgtgtcatttggattagacggagcccaaccatccatcattttgcagcagcctgggaaggcccacaaagtgcccgtatctccttagggaaaataaataaatacaatcatgaaagctggcagttaggctgacccaaactgtgctaatggaaaagatcagtcatttttattttggaatgcaaagtcaagacacacctacattcttcatagaaatacacatttacttggataatcactcagttctctcttcaagactgtctcatgagcaagatcataaaaacaagacatgattatcatattcaattttaacagatgttttccattagatccctcaaccctccacccccagtccaggttattagcaagtcttatgagcaactgggataattttggataacatgataatactgagttccttcaaatacataattcttaaattgtttcaaaatggcattaactctctgttactgttgtaatctaattccaaagccccctccaggtcatattcataattgcatgaaccttttctctctgtttgtccctgtctcttggcttgccctgatgtatactcagactcctgtacaatcttactcctgctggcaagagatttgtcttcttttcttgtcttcaattggctttcgggccttgtatgtggtaaaatcaccaaatcacagtcaagactgtgtttttgttcctagtttgatgcccttatgtcccggaggggttcacaaagtgctttgtcaggactgctgcagttagaaggctcactgcttctcctaagccttctgcacagatgtggcacctgcaacccaggagcaggagccggaggagctgccctctgacagcaggtgcagcagagatggctacagctcaggagctgggaaggtgatggggcacagggaaagcacagatgttctgcagcgccccaaagtgacccattgcctggagaaagagaagaaaatattttttaaaaagctagtttatttagcttctcattaattcattcaaataaagtcgtgaggtgactaattagagaataaaaattactttggactactcaaaaatacaccaaa

SEQ ID NO: 38 - DNA, 5139 bp, Homo sapiens
  source 1..5139: mol_type = genomic DNA
agttggaaagagaccacagactttgagggaagctcactcaggatctgctctccggcaaagtagtaagtgaggtgctgagagcagaatgagctactttgtggattctgctgggagcagccccgtcccttactcagcgcctcgtcctgcagtggtgaggcaaggacctagcaacacttatgaagatcctcgaatgaactgtggtttccagtccaattatcaccagcaaagaccttgctaccccttttgggatgagatggcaactcaggaagttcctactggtcttgaacactgtgtctcagatatggaatgtgcagatgtcccactattaactccaagcagcaaagaaatgatgtctcaagcattaaaagctactttcagtggtttcactaaagaacagcaacgactggggatcccaaaagacccccggcagtggacagaaacccatgttcgggactgggtgatgtgggctgtgaatgaattcagcctgaaaggtgtagacttccagaagttctgtatgaatggagcagccctctgcgccctgggtaaagactgctttctcgagctggccccagactttgttggggacatcttatgggaacatctagagatcctgcagaaagaggatgtgaaaccatatcaagttaatggagtcaacccagcctatccagaatcccgctatacctcggattacttcattagctatggtattgagcatgcccagtgtgttccaccatcggagttctcagagcccagcttcatcacagagtcctatcagacgctccatcccatcagctcggaagagctcctctccctcaagtatgagaatgactacccctcggtcattctccgagaccctctccagacagacaccttgcagaatgactactttgctatcaaacaagaagtcgtcaccccagacaacatgtgcatggggaggaccagtcgtggtaaactcgggggccaggactcttttgaaagcatagagagctacgatagttgtgatcgcctcacccagtcctggagcagccagtcatctttcaacagcctgcagcgtgttccctcctatgacagcttcgactcagaggactatccggctgccctgcccaaccacaagcccaagggcaccttcaaggactatgtgcgggaccgtgctgacctcaataaggacaagcctgtcattcctgctgctgccctagctggctacacaggcagtggaccaatccagctatggcagtttcttctggaattactcactgataaatcctgtcagtcttttatcagctggacaggagatggctgggaattcaaactttctgacccagatgaggtggccaggagatggggaaagaggaaaaacaaacctaagatgaattatgagaaactgagccgtggcctacgctactattacgacaaaaacatcatccacaagacagcggggaaacgctacgtgtaccgctttgtgtgtgacctgcagagcctgctggggtacacccctgaggagctgcacgccatgctggacgtcaagccagatgccgacgagtgatggcactgaaggggctggggaaaccctgctgagaccttccaaggacagccgtgttggttggactctgaattttgaattgttattctattttttattttccagaactcattttttaccttcaggggtgggagctaagtcagttgcagctgtaatcaattgtgcgcagttgggaaaggaaagccaggacttgtggggtgggtgggaccagaaattcttgagcaaattttcaggagagggagaagggccttctcagaagcttgaaggctctggcttaacagagaaagagactaatgtgtccaatcatttttaaaaatcatccatgaaaaagtgtcttgagttgtggacccattagcaagtgacattgtcacatcagaactcatgaaactgatgtaaggcaattaatttgcttctgtttttaggtctgggagggcaaaaaagaggtgggtgggatgaaacatgttttggggggggatgcactgaaaatctgagaactatttacctatcactctagttttgaagcaaagatggacttcagtggggaggggccaaaaccgttgttgtgttaaaatttattttattaaattttgtgccagtattttttttcttaaaaatcgtcttaagctctaaggtggtctcagtattgcaatatcatgtaagtttgtttttatttgccggctgaggattctgtcacaatgaaagaaaactgtttatatagaccccattggaaaagcaaaacgctctcactgagatcagggatcccaaattcatgggacttatataagaaggacaattaatgctgatttgggtacaggggaattatgtgtgtgaatgtcatctacaattaaaaaaaattagcacatccctttacttacttgttatcagtggattctcggggtttggacttaatgttgagctaagaagcattaagtctttgaactgaatgtattttgcatccctggttttggacgacagtaaacgtaggagcactgttgaagtcctggaagggagatcgaaggaggaagattgacttggttctttcttagtcctatatctgtagcatagatgacttggaataaaagctgtatgcatgggcattacccctcaggtcctaagaaataagtcctgaatgcatgtcgttccaaactaacactctgtaatttttcttttatgtcttattttccaagagtcctccattttttgcaccccctcaccgccaactctgttattcagtagagagaagtgtacggctttctgattggtgagtgaaaaagtaacttgagacacgacctaagttgaagagtttagacttgctgagttttagaagtgatggaaattaagagagcatttcaataaaatgtgacttggctgtctttggaagagaagtgcaaggctttcctttgaagaatttaaattagtccggtaggatgtcaggtgagactgtgtatgcaaaatgaatggcacaggtgatgccagggcctcttgcttgggtctgatgtcttggcacagggtaagtgaaggttaattccagaagagaggaatgacttgaaggcaaaggaaactaaggaaggaggttcagtgaggaaaataaggttgtccatgagatttgaatagatttttagttcccccaaggtttaaatacaaacatagtcaagcaaggtagtcatctttctgctggttgtgagggggaatctgaaaatggagttttagaggaaaagtcaacatctaactagtgaggaaaagtgcctaatacaattagaatctccctcactctatagttgcccagttgaaaggataaggaggaggggtggcttttatggacttccatgagagaaggaaagaaatatttcaggtaagcttctcagggctggccctttttgggatttggatgagaaattggaagtactaactactttctagcatatctttaagaaaattgattgttatttactcccagatcctcttgcagacccagaattatcaggaacatagctctgtgattcatgagtgtccccatactgatgaattggagcatccatatggaaagcaaaggcagaattatcccagctgtattattttgatcttttggatgcaggtgccttaatgaagctctcaaaatattttaggagctgctcagggagtgttgggtggaactgtttggactacattgttttctcttagattatgtgatttttgttgggcactggcaaaaggtgtgtgtgtgaatgtgtgcatgtgtgtgaatgttgtgtgtgtgtgtgtgtgtgtgtgtgtgtgtgtgtgtgtgtgtgtttgcagacatgcaaaactgcagctgaaataataccttagatttctaggtaagtctttccacatttcaataatgggtaagagtagaaccagggccgggtatcaattattgcttgctgtttgcaaccaggcataaaatcactttctcaaatcatccaccgttcctattaaatttatgccggaaactctccttctgtgagtataactcctgcagttcctatagcagataagatataagaaagtgcctcctagtgctcctccgcccgcttgtttgctaaaattccctttctctctaagtccaccattttcaagatttgtagatagtgtattagttaagacagctttgtcgatctggccagatgttttttctcctttgtccaaaggccagagaccatcccaggaagagtggtgggtggtttatacactggaaatgttgcgtttatgctttttaaaaacacacgttaacttcagaggaaggatgggcaaatctggtctagctgggtgaaacccttattttcccagagatgccttaacctttgttggttttggctttagggttcagagtcacttttgttcccttctccattctggagagggacttcccctacatagagccctgatttttgtggctgtggggattggaggtagcattcaaagatcagatgtgcttttcctcactttggagatgaacactctgggttttacagcattaacctgcctaaccttcatggtgagaaatacaccatctctcttctagtcatgctgtgcatgccgcttactctgttggggtctatataaatttgttgaactcttacctacattccaaagaagtttcaaggaaccataaatatatgtatacatatacatatataaaatatatatattaaaataaaattatcaggaatactgcctcagttattgaacttttttttttaagaatactttttttttaagctgagaagtatagggatgaaaaagatgttatattgtgtttgactattttccaacttgtattttcatataatttatattttttaaaagctgaaaatttagaagcaagatgaaaaaaaggaaaagcaggtgctttttaaaaatcagaactgaggtagcttagagatgtagcgatgtaagtgtcgatgtttttttaaaaaaaaatgcaaaaaaattcttatggcggagttttttgtttgtttattttagtagctgatgctggcacatcattttgctggagagttttttatatactgtagcctgatttcatattgtattttaaactgtgtgaaattaaaaacaaagaatttcattcataa

SEQ ID NO: 39 - DNA, 2591 bp, Homo sapiens
  source 1..2591: mol_type = genomic DNA
aggcagtggagccccggcggcggcggcggcggcgcgcgggggcgacgcgcgggaacaacgcgagtcggcgcgcgggacgaagaataatcatgggccagactgggaagaaatctgagaagggaccagtttgttggcggaagcgtgtaaaatcagagtacatgcgactgagacagctcaagaggttcagacgagctgatgaagtaaagagtatgtttagttccaatcgtcagaaaattttggaaagaacggaaatcttaaaccaagaatggaaacagcgaaggatacagcctgtgcacatcctgacttctgtgagctcattgcgcgggactagggagtgttcggtgaccagtgacttggattttccaacacaagtcatcccattaaagactctgaatgcagttgcttcagtacccataatgtattcttggtctcccctacagcagaattttatggtggaagatgaaactgttttacataacattccttatatgggagatgaagttttagatcaggatggtactttcattgaagaactaataaaaaattatgatgggaaagtacacggggatagagaatgtgggtttataaatgatgaaatttttgtggagttggtgaatgcccttggtcaatataatgatgatgacgatgatgatgatggagacgatcctgaagaaagagaagaaaagcagaaagatctggaggatcaccgagatgataaagaaagccgcccacctcggaaatttccttctgataaaatttttgaagccatttcctcaatgtttccagataagggcacagcagaagaactaaaggaaaaatataaagaactcaccgaacagcagctcccaggcgcacttcctcctgaatgtacccccaacatagatggaccaaatgctaaatctgttcagagagagcaaagcttacactcctttcatacgcttttctgtaggcgatgttttaaatatgactgcttcctacatccttttcatgcaacacccaacacttataagcggaagaacacagaaacagctctagacaacaaaccttgtggaccacagtgttaccagcatttggagggagcaaaggagtttgctgctgctctcaccgctgagcggataaagaccccaccaaaacgtccaggaggccgcagaagaggacggcttcccaataacagtagcaggcccagcacccccaccattaatgtgctggaatcaaaggatacagacagtgatagggaagcagggactgaaacggggggagagaacaatgataaagaagaagaagagaagaaagatgaaacttcgagctcctctgaagcaaattctcggtgtcaaacaccaataaagatgaagccaaatattgaacctcctgagaatgtggagtggagtggtgctgaagcctcaatgtttagagtcctcattggcacttactatgacaatttctgtgccattgctaggttaattgggaccaaaacatgtagacaggtgtatgagtttagagtcaaagaatctagcatcatagctccagctcccgctgaggatgtggatactcctccaaggaaaaagaagaggaaacaccggttgtgggctgcacactgcagaaagatacagctgaaaaaggacggctcctctaaccatgtttacaactatcaaccctgtgatcatccacggcagccttgtgacagttcgtgcccttgtgtgatagcacaaaatttttgtgaaaagttttgtcaatgtagttcagagtgtcaaaaccgctttccgggatgccgctgcaaagcacagtgcaacaccaagcagtgcccgtgctacctggctgtccgagagtgtgaccctgacctctgtcttacttgtggagccgctgaccattgggacagtaaaaatgtgtcctgcaagaactgcagtattcagcggggctccaaaaagcatctattgctggcaccatctgacgtggcaggctgggggatttttatcaaagatcctgtgcagaaaaatgaattcatctcagaatactgtggagagattatttctcaagatgaagctgacagaagagggaaagtgtatgataaatacatgtgcagctttctgttcaacttgaacaatgattttgtggtggatgcaacccgcaagggtaacaaaattcgttttgcaaatcattcggtaaatccaaactgctatgcaaaagttatgatggttaacggtgatcacaggataggtatttttgccaagagagccatccagactggcgaagagctgttttttgattacagatacagccaggctgatgccctgaagtatgtcggcatcgaaagagaaatggaaatcccttgacatctgctacctcctcccccctcctctgaaacagctgccttagcttcaggaacctcgagtactgtgggcaatttagaaaaagaacatgcagtttgaaattctgaatttgcaaagtactgtaagaataatttatagtaatgagtttaaaaatcaactttttattgccttctcaccagctgcaaagtgttttgtaccagtgaatttttgcaataatgcagtatggtacatttttcaactttgaataaagaatacttgaacttg

SEQ ID NO: 40 - DNA, 5600 bp, Homo sapiens
  source 1..5600: mol_type = genomic DNA
aggccggcgcgatggcgactgctgtggagacggaggcctgtcagccgacggatgcgagttgggaaagtggcggcggcggagacgacgagatgaagcaggcgcttccggagcttgagtcctcccaacaaaatggcggcggcggcggcctcaacatcgctgagcccagcggcggcgctgggcgtgaggagaacgcgggggccgaggccgcccagagcctcagccacgagcagcctcaggactcctctgaggcgggcgcggccgccctgcccagaggccccgaagagcccgaaaggcctgttaggaggagttttcagatccccaggaagagcagagaaaagaaagcacttttccagccattaactccaggctctcgagaatttgaagatgttgtaaatattctccattcttcttaccttgaaccaacctcagtaacaaattttaactacagacgtgcttgcttggtacacaatgagcttttggaaaaggagtttacagaaaagcgaagagaactgaagtttgatggtcgtttagataaggaactttcagaatcctatgcatttctgatggttgatcgataccaggttcaaaccatatgtgaaaaaggattacatgtgggtcagtccaaaataacaattcttggcagtccttccatgggtgtctatctttctaggtatgctgatttattacaagcgaatcctttggacacgggggcaatgggtgatgttgttatttttaaaataatgaagggtaaaataaagagtatatatgaccccatgggtgtaaaaagtttggaatctatgttaaataagagtgctttggaccccacaccaaagcatgaatgtcacgtgtcaaagaatgccaatcgaattacatcacttttggcttacagagcctatgagcttactcagtattatttttatgagtatggctttgatgagctaaggcgaagaccaagacacgtttgtccatatgcagttgtgtcttttacttacaaagatgatatacaaactccgaagtttgtaccttcatcaagatctaacagctttaatacagatagaaacatagataaatataactataccttgtggaaaggacagcttttaaataaaggaaaacttttgtgttatatttctctgaggtcagccactcgtgcttttttgcctatcaaactacctgagaaattagatgttgaaacagttatgagtattgatcatctgaaacagaaaatccctccagcactgttttataaggaaacatacttaggtccaaatgaagttttgaagaatggaatgtattgcagcctttatgaagttgtggaaaagacaagaattggaagtaacatggagagtttactgcaaaaactagacagagaaaaacttgttcttgttaaacctttgggagaccgaggatacctttttcttctctccccttatcagatggttcctccatatgaatatcagactgccaagtctcgagtcctacatgctttgtttctatttcaagaacctagaagcatagttacttcacaaaaaggttcaaccaatgcagcaccacaggagaggcatgagagcatgccagatgtattaaaaatagctcagtttttacaattttctttgattcagtgtcgaaaggaattcaaaaatataagcgccataaattttcattctgttgttgaaaagtatgtaagtgaattttttaagcgaggttttggttcaggtaaacgagagtttattatgtttccatatgattcacgattagatgataaaaaattcttatactcagctcccagaaataaatcccatattgatacttgtttgcatgcctatatttttcggcctgaagtgtatcagttacctatttgtaaattaaaagaactatttgaagaaaatagaaaacttcagcagtttagtccactttcagattatgaaggtcaagaagaagaaatgaatggtacaaaaatgaaatttggaaaacgaaataactcaagaggtgaagccattatatctggaaagcaaagatcatctcattctttggattatgataaggatagagtcaaagaattgattaatttaattcagtgtaggaaaaagagtgtgggtggggactcagacacagaagatatgagaagcaaaactgtcttgaagaggaagcttgaggatctacctgaaaatatgagaaagctcgccaaaaccagtaatttatctgaaaattgccatctgtatgaagagtctccacagcctattggctcacttggacatgatgctgacttgaggcggcagcagcaggatacctgtaactccggcattgctgacatccataggctgtttaattggttatcagaaacactagcaaatgcgcgccattctgatgcatctctgacagacacagtcaacaaagccttaggattgagcactgatgatgcctatgaagagctgaggcaaaaacatgagtatgagttgaactctaccccagataagaaagactatgagcagcctacttgtgcaaaagttgaaaatgcacagtttaagggtactcagagcttattactagaagttgatgcaacatctaagtattctgttgctatttctaccagcgaagtgggcactgaccataagctacatttgaaagaagatccaaatttaattagcgtgaataattttgaagattgcagtttgtgtcccagtgttcccattgaacatggatttcgtagacaacagtctaagtcaaataatgttgaagagactgaaatacattggaaactgattccaattacaggagggaatgcaagaagcccagaagaccagctggggaaacatggtgagaaacaaacaccaggtatgaaatcaccagaagaacaactggtgtgtgtgccaccacaggaggcctttcctaacgacccccgggtaataaatagacagagaagttctgattaccagtttccatcctctccatttacagacacactaaagggcaccactgaggatgacgtgttgacaggtcaggtggaggagcagtgtgtgccagcagcagaggcagagccgcctgcagtgagcgaaaccacagagaggacagtgttaggagagtacaatctcttttctaggaagatagaagagattttgaagcaaaagaatgtttcatatgtcagtacagtttccacacctatcttttcaacacaagagaagatgaaacggctttccgagttcatatattctaagacttccaaagctggtgtgcaggagtttgtagatggtttgcatgagaagctaaatactattattattaaagcatcagccaagggtgggaatttgccaccagtcagtcctaacgattctggtgctaagatagcatcgaatcctctggaaaggcatgtcataccagtttcctcaagtgacttcaacaataaacatctccttgagccactgtgtagtgatcctttgaaagataccaactctgatgagcagcattccacttcggctttaactgaagtagaaatgaaccagcctcaacatgccacagagttaatggtgacttctgatcatattgtacctggtgatatggcccgggaaccagtagaagaaacaacaaaatcccccagtgatgtaaacatttctgctcaaccagctctttcaaattttataagccagttagaacctgaagtatttaatagtttggttaaaatcatgaaagacgtccagaaaaatactgtgaaattttatattcatgaagaagaagagagtgtgctctgtaaagaaataaaggaatatcttatcaaattaggcaatacagaatgtcatcctgaacagtttttggaaagaagatcaaaattagataaactattgattattattcaaaatgaagacattgcaggtttcattcacaagatacctggcttggtgactttaaagaagctcccctgtgttagttttgctggtgttgatagcctggatgatgttaaaaatcatacatacaatgaattatttgtatctggaggttttatcgtatctgatgaatcaattctaaacccagaggttgtcacagttgagaaccttaaaaattttttgacattccttgaggaacttagtactccagaaggaaaatggcaatggaaagtccactgtaaatttcagaagaaactaaaggaactaggcagattgaatgctaaagctctaagtctgttgacgcttctgaatgtctatcagaagaaacatctggttgaaattttgtcataccacaattgtgattcacaaactcgaaatgctccagaattggattgccttatcagacttcaggctcagaacatacagcaacgacacatagtctttttaacagagaagaacatcaagatgctttccagttatacagataatggaatagtggttgcaactgctgaagacttcatgcaaaactttaaaaatcttgtgggctatcacaattcaatcacagaagaaaaccttccacagcttggtgctaatgagaatcttgagtcgcagtcagatgctgttttgacattaacccctttggagctgggagttgggatttcccaacattaaacgtgaacacatttcgcagaagcttttagcatcggattatctggacattcacatctagtgtgagtgttgtgactaagtgaacttgtggcagaagaccaagctttaagggattgtggacttgcagaccctgacgcgttatattgtgtgagtagtgtataattttaaaacttaaacaaactgtgtatttcaatagaggaggactttttgttttttaaatgtagctcttttagaaaacgatgaaaaggatgaagaggatatgtctctggattcaggggatgaaatctcacatatagaagtatgcagcaattttcattcagaaatatgggagaaagagaccaaaggatcacgtggaacagatcaaaaaaagaatactcaaattgagttgcaatcgtctcctgatgtgcaaaacagtttattagaagataagacttaccttgattctgaagagagaacttctattgatatagtatgctctgaaggagagaacagcaattcaacagaacaagattcatatagtaactttcaggtttatcatagtcaattaaatatgtcccatcagtttagtcattttaatgttctcactcatcagacatttttggggacaccatatgccctttcatcaagtcagtctcaagaaaatgagaattacttcttatctgcttatactgaaagcttggatagagataaatctccacctcccttaagttgggggaaaagtgattcttccaggccatattcacaagagaaataactgtagtaactttttttttaagagattgttgtggactttgtttattaacaatttatatttcattctctaaacaaaaggttcttgttctttctcaaatgttttttcttttatttaaatcatgatggcctgtaacagttgaagcatctaaaaattgaaataaatatatatttttaacatatattgtacttgaattatctcatgttggcacttctaagttttactttttgtatgttacctgtacttaggcttcaaattgaagcctgttttatgtgtaaaatcagatgcttgcaggaggacgg

SEQ ID NO: 41 - DNA, 1248 bp, Homo sapiens
  source 1..1248: mol_type = genomic DNA
ataagctgggtcccgatgccgcgagcggaatctcggcgctcccggaagtggcctgaaggcggcgcgccagtcccgagcagtgctcgctcctgctcggggcgctgcggccccgggcgtcgccatgaccagtgagctggacatcttcgtggggaacacgacccttatcgacgaggacgtgtatcgcctctggctcgatggttactcggtgaccgacgcggtggccctgcgggtgcgctcgggaatcctggagcagactggcgccacggcagcggtgctgcagagcgacaccatggaccattaccgcaccttccacatgctcgagcggctgctgcatgcgccgcccaagctactgcaccagctcatcttccagattccgccctcccggcaggcactactcatcgagaggtactatgcctttgatgaggcctttgttcgggaggtgctgggcaagaagctgtccaaaggcaccaagaaagacctggatgacatcagcaccaaaacaggcatcaccctcaagagctgccggagacagtttgacaactttaaacgggtcttcaaggtggtagaggaaatgcggggctccctggtggacaatattcagcaacacttcctcctctctgaccggttggccagggactatgcagccatcgtcttctttgctaacaaccgctttgagacagggaagaaaaaactgcagtatctgagcttcggtgactttgccttctgcgctgagctcatgatccaaaactggacccttggagccgtcgactcacagatggatgacatggacatggacttagacaaggaatttctccaggacttgaaggagctcaaggtgctagtggctgacaaggaccttctggacctgcacaagagcctggtgtgcactgctctccggggaaagctgggcgtcttctctgagatggaagccaacttcaagaacctgtcccgggggctggtgaacgtggccgccaagctgacccacaataaagatgtcagagacctgtttgtggacctcgtggagaagtttgtggaaccctgccgctccgaccactggccactcagcgacgtgcggttcttcctgaatcagtattcagcgtctgtccactccctcgatggcttccgacaccaggccctctgggaccgctacatgggcaccctccgcggctgcctcctgcgcctgtatcatgactgaggtgcctcccaacgctccgcccacgctgacaataaagttgctctgagtttgga

SEQ ID NO: 42 - DNA, 3130 bp, Homo sapiens
  source 1..3130: mol_type = genomic DNA
caacaacaaacgtgcacaggggagtgagggcagggcgctcgcagggggcacgcagggagggcccagggcgccagggaggccgcgccgggctaatccgaaggggctgcgaggtcaggctgtaaccgggtcaatgtgtggaatattggggggctcggctgcagacttggccaaatggacgggactattaaggaggctctgtcggtggtgagcgacgaccagtccctctttgactcagcgtacggagcggcagcccatctccccaaggccgacatgactgcctcggggagtcctgactacgggcagccccacaagatcaaccccctcccaccacagcaggagtggatcaatcagccagtgagggtcaacgtcaagcgggagtatgaccacatgaatggatccaggcgccagctgcctcattaaagagcagccttttatgctgggcttcacctgtacccaccctgagcggcagccgtggagccccatggccgcacgcagggcttgcgctggctggaggaggcacggtgcttgggagctgcaagaatggagggaggactggcaggcgagcgggcgagggagtctccggtggactgcagcgttagcaaatgcagcaagctggtgggcggaggcgagtccaaccccatgaactacaacagctatatggacgagaagaatggcccccctcctcccaacatgaccaccaacgagaggagagtcatcgtccccgcagaccccacactgtggacacaggagcatgtgaggcaatggctggagtgggccataaaggagtacagcttgatggagatcgacacatcctttttccagaacatggatggcaaggaactgtgtaaaatgaacaaggaggacttcctccgcgccaccaccctctacaacacggaagtgctgttgtcacacctcagttacctcagggaaagttcactgctggcctataatacaacctcccacaccgaccaatcctcacgattgagtgtcaaagaagacccttcttatgactcagtcagaagaggagcttggggcaataacatgaattctggcctcaacaaaagtcctccccttggaggggcacaaacgatcagtaagaatacagagcaacggccccagccagatccgtatcagatcctgggcccgaccagcagtcgcctagccaaccctggaagcgggcagatccagctgtggcaattcctcctggagctgctctccgacagcgccaacgccagctgtatcacctgggaggggaccaacggggagttcaaaatgacggaccccgatgaggtggccaggcgctggggcgagcggaaaagcaagcccaacatgaattacgacaagctgagccgggccctccgttattactatgataaaaacattatgaccaaagtgcacggcaaaagatatgcttacaaatttgacttccacggcattgcccaggctctgcagccacatccgaccgagtcgtccatgtacaagtacccttctgacatctcctacatgccttcctaccatgcccaccagcagaaggtgaactttgtccctccccatccatcctccatgcctgtcacttcctccagcttctttggagccgcatcacaatactggacctcccccacggggggaatctaccccaaccccaacgtcccccgccatcctaacacccacgtgccttcacacttaggcagctactactagaagcttactcatcagtggccttctagctgaagcccatcctgcacacttactggatgctttggactcaacaggacatatgtggccttgaagggaagacaaaactggatgttctttcttgttggatagaacctttgtatttgttctttaaaaacattttttttaatgttggtaacttttgcttcctctacctgaacaaagagatgaataattccatgggccagtatgccagtttgaattctcagtctcctagcatcttgtgagttgcatattaagattactggaatggttaagtcatggttctgagaaagaagctgtacgttttctttatgtttttatgaccaaagcagtttcttgtcaatacacggggttcagtatgacacagaatcatggacttaacccgtcatgttctggtttgagatttagtgacaaatagaggtgggaagcttataatctaattttaggaggaccaaattcagtggatggcaactggaacattgattgtaaggccagtgaagttttcacccaactggaatttgatggaaagaaggtttgtgtgtttaagacgccaagggcattgcagaatccctctcagtggacagtatgcactcagctgaccactctctctagaaatagtcaagatatgaactaagaaattttaatgcaaatacatacattcctgaaagacggggaattaaattactaatttttttttttttttaaatgatgacagtggtcccagaacttggaaaagttgtagggatttctaaactcaagcagattcgcaagtgctgtgcgcttgtcagaccatcagaccagggccaaccaatcagaaggcaacttactgtataaattatgcagagttattttcctatatctcacagtattaaaaataaataattaaaaattaagaataaataaacgagttgacctcggtcacaaaagcagttttactatcgaatcaatcgctgttattttttttaatgtaatttgtacatcttttttcaatctgtacatttgggctgtctgtatgtttttatagctggtttttaaaaagcataatatgcctatagctgaaaaggaaacagggctgtttaagtcactgacttatgagaaagcaaagcactggtacagttatttaacaggcatacacaagcagggaaaagataatccatttagatctttaatgctttggaaatgcgtgtaacagtactgcaataatcacagctctgggaaaaacaacgaaactttcccttgtggagaggagggattttcctgctctatataagcaacatatttttagacattaaaatatatataattttgcaggtaattgttgacttttttaactatattaagtgttaagctgacaactgtcaaagaagaccatgttgtaaaataatttgactaaataaatggttccttctctcag

SEQ ID NO: 43 - DNA, 6453 bp, Homo sapiens
  source 1..6453: mol_type = genomic DNA
gctcctccccggcagcggcggcggctcggagcgggctccggggctcgggtgcagcggccagcgggcgcctggcggcgaggattacccggggaagtggttgtctcctggctggagccgcgagacgggcgctcagggcgcggggccggcggcggcgaacgagaggacggactctggcggccgggtcgttggccgcggggagcgcgggcaccgggcgagcaggccgcgtcgcgctcaccatggtcagctactgggacaccggggtcctgctgtgcgcgctgctcagctgtctgcttctcacaggatctagttcaggttcaaaattaaaagatcctgaactgagtttaaaaggcacccagcacatcatgcaagcaggccagacactgcatctccaatgcaggggggaagcagcccataaatggtctttgcctgaaatggtgagtaaggaaagcgaaaggctgagcataactaaatctgcctgtggaagaaatggcaaacaattctgcagtactttaaccttgaacacagctcaagcaaaccacactggcttctacagctgcaaatatctagctgtacctacttcaaagaagaaggaaacagaatctgcaatctatatatttattagtgatacaggtagacctttcgtagagatgtacagtgaaatccccgaaattatacacatgactgaaggaagggagctcgtcattccctgccgggttacgtcacctaacatcactgttactttaaaaaagtttccacttgacactttgatccctgatggaaaacgcataatctgggacagtagaaagggcttcatcatatcaaatgcaacgtacaaagaaatagggcttctgacctgtgaagcaacagtcaatgggcatttgtataagacaaactatctcacacatcgacaaaccaatacaatcatagatgtccaaataagcacaccacgcccagtcaaattacttagaggccatactcttgtcctcaattgtactgctaccactcccttgaacacgagagttcaaatgacctggagttaccctgatgaaaaaaataagagagcttccgtaaggcgacgaattgaccaaagcaattcccatgccaacatattctacagtgttcttactattgacaaaatgcagaacaaagacaaaggactttatacttgtcgtgtaaggagtggaccatcattcaaatctgttaacacctcagtgcatatatatgataaagcattcatcactgtgaaacatcgaaaacagcaggtgcttgaaaccgtagctggcaagcggtcttaccggctctctatgaaagtgaaggcatttccctcgccggaagttgtatggttaaaagatgggttacctgcgactgagaaatctgctcgctatttgactcgtggctactcgttaattatcaaggacgtaactgaagaggatgcagggaattatacaatcttgctgagcataaaacagtcaaatgtgtttaaaaacctcactgccactctaattgtcaatgtgaaaccccagatttacgaaaaggccgtgtcatcgtttccagacccggctctctacccactgggcagcagacaaatcctgacttgtaccgcatatggtatccctcaacctacaatcaagtggttctggcacccctgtaaccataatcattccgaagcaaggtgtgacttttgttccaataatgaagagtcctttatcctggatgctgacagcaacatgggaaacagaattgagagcatcactcagcgcatggcaataatagaaggaaagaataagatggctagcaccttggttgtggctgactctagaatttctggaatctacatttgcatagcttccaataaagttgggactgtgggaagaaacataagcttttatatcacagatgtgccaaatgggtttcatgttaacttggaaaaaatgccgacggaaggagaggacctgaaactgtcttgcacagttaacaagttcttatacagagacgttacttggattttactgcggacagttaataacagaacaatgcactacagtattagcaagcaaaaaatggccatcactaaggagcactccatcactcttaatcttaccatcatgaatgtttccctgcaagattcaggcacctatgcctgcagagccaggaatgtatacacaggggaagaaatcctccagaagaaagaaattacaatcagaggtgagcactgcaacaaaaaggctgttttctctcggatctccaaatttaaaagcacaaggaatgattgtaccacacaaagtaatgtaaaacattaaaggactcattaaaaagtaacagttgtctcatatcatcttgatttattgtcactgttgctaactttcaggctcggaggagatgctcctcccaaaatgagttcggagatgatagcagtaataatgagacccccgggccccagctctgggccccccattcaggccgagggggctgctccggggggccgacttggtgcacgtttggatttggaggatccctgcactgccttctctgtgtttgttgctcttgctgttttctcctgcctgataaacaacaacttgggatgatcctttccttccattttgatgccaacctctttttatttttaagtgttgaagctgcacaaactgaataatttaaacaaatgctggtttctgccaaagatggacacgaataagttaattttccagctcagaatgagtacagttgaatttgagactctgtcggacttctgcctggttttatttgggactatttcatctgctcttgatttgtaaatagcacctggatagcaagttataatgcttatttatttgaaaatgctttttttttttttacgttaagcacatttatcttgaactggagcttctaaaatgggccccaggggtgcaagatgttggtgtaattcagagatagtaaaggtttatcgcagtgtgaattataagagtccatccaaatcaacgtcccctccctcctctcatgcgatccaggtaattatgcagttagtgccacagtagactagcctagcaaagggtttgctccttgctgtctctgactgcaccacacagctattgatggcagctgaaagaaagtggatcatgccttaattttaaatattcctgtcctctggttattattttaaggaacttcatcatgttaaaatgacagcattcaaaggtgtaccacaatcaatttatcaaggaaataaaggctattgtaaccagagatttaatgcattcttctaaatgtaaatttaaaatttgccctttaaaaaagtccactttccccatatgcaaatgttaataggatttttatggggattaagaagcggcaaaactacagaagcagaattcaaagtaatttaaaaaatacacaccagttttaaatcaagagaagttgtaatctcttgttttaagcttgcgtttgagggaaaatgactttttcaccaatttaatatgcattgttctgttgtttttatttatgattgatcattatatgtgacttgcataaactatttaaaaaaaaaaactataatgaccaaaatagccatggctgagaaacacagtggctgggcagttcaataggaggtgacaatatgacaacttctcaagcttgggaactcaccagactgtttcctcctttaggtaacagattctgtcccacggctaaacttgtctttcacgtgggaattgcttttgtcaaacgtgaaagagtaaacaatagcatttccccagaatgccagttttatggagccccaaatgctctgaaaacaattagtaacctggaagttgtcagcccaaaggaaagaaaaatcaattgtatcttgaaattttacctatggctctttggcctggcttctttgttcattataagttagtgtgttccttcaggaaacaatgccttaataccatagaacatgggggccttaatagttgctaacattaaaaaagcaaacagaatgattgagggatccttatgaaaacaaaatggtgaattggacatgcagaacctaccatttccttcccctgtttgcaatttttgtggggaggggaggatgttagtatttacaaaagatgattttaagaacttccaagagatgagtttaagaattccatagagtattagttgttcactgtgtaattaatccttccggagagtctttttttttttttttaaagaaacttttgggtgggttttgttttttattagttaccctaggggtatgttaccctggggtatgaagggaggtgaagataacggaggggggagaaaaaaaaaaggagaaaaaaggagcctaaaatggggaataattgaaatggaacagggggtgtgaggctggttcctcagtccccattccaaacggaggatagaagctgtgtatttatgtgacctggcagatctctggggccataacactgaaaagtgaaagaacctggtgggcagctatctttggctactgataaccagcagaaatgtctgttaattctgattttctcaatttgaagggatcagctacactgttaaattttggaaagccactacctacttccatcaagtaacttaggtttcgaaatatgggttcaacgcacctcccttattcaaaatgtcaaaatagattattataatgtataaagtaagaattgacaaaatatgattcttgggttgattggtcatttagaaactagccaaaagtgagacttttaatgtagaacatttttcagaaatgggtacaaagaaaaatgcatattactgtatatttcagagtgtttatgtgaaccttgtatttaattgagagtcccatgtacgttctgcagcctttttgctgcttctatcatctgaagtttgtgtagtacaaataaggcctttgggattcttaatgacatttatgttaaaatgttctcttctctttaaacaccgttttccaatccacctgtcagggagtccaaatcgtgtctgtgttgatgatgctatactttgtagctagaaaaacaattttagtgttgtgggctctgtattcagacttcctttttacaagaccgatgggcagtgatagattattttatcatatttaatgcatgggaaatagtgtgctgaggaagctattaaaagtataactcagtgaattgggtctgagttttaaatgagatatttcaaaattggcttgccactgtaaaagcgactaaataataatatgatactgttctttatgatcttgtcatgtttcactgatatgtttggggtcttcactatgtaaaaaatgtcaaaattgtaatgagcaagcatgtacaagtagtcgtaaatcaaaggttttaaacaggactgcattttcaattaggaaaagctgtttggcagatagcatccaatgcaaaaacagaaatatcgtaacgttctgcttagtgggcaagataagataggaaagacatgctcaaagaggcaaaagaatcattgctatcattcattctacactagtttgaagaagtttttgtacatcagagcacttccttcagcacacttttttgccttcagatttcattttttataaaatgagaagactaatgataaactgtagaaatcaaaatttattgagaaatctgtttctcctaacagatagtaaccctgccatgatatactacttcaacaatgttataaaatttatgtgataatatacattttaacctgggatttctaaattgctttaacaaatgctaatcctgagagttgccctgcaggactcaaaagggaaaggttttgggacgtggcagaaccctgcagggacatggaattaaggccattgcaatgtatcatctttgtagcattgtcatcactcctaagctgccttcacagttttagtacactaagatgaggaaatcgaaaatgggcagagaaagctcatactgtataattgaagacagtgacagagaacgtgtcagttatgccaaaactcttttgatttctgttccaggatttccaacaagaggggaaaggaatgacttgggagggtgggaaagacattaggagttgtttttattttttaccttggaagctttagctaccaatccagtaccctcctaactagaatgtatacacatcagcaggactgactgactacttcattagagatatactgtactcattgggggccttgggggtactgctgttcttatgtgggattttaatgttgtaatgtattgcatcttaatgtattgaattcattttgttgtactatattggttggcattttattaaaataaattgtattgtatcatatttgtatgttttaagagaaaataatataaaatacaatatttgtactattatatagtgcaaaaactacaaatctgtgcctctgcctcttgaattaattctttggttgcttgcatttgggaagggaatggagaaaggaaagaaccaataaagctttcaaagttcaagaaa

SEQ ID NO: 44 - DNA, 2274 bp, Homo sapiens
  source 1..2274: mol_type = genomic DNA
gcacacactcatcgaaaaaaatttggattattagaagagagaggtctgcggcttccacaccgtacagcgtggtttttcttctcggtataaaagcaaagttgtttttgatacgtgacagtttcccacaagccaggctgatccttttctgtcagtccacttcaccaagcctgcccttggacaaggacccgatgcccaaccccaggcctggcaagccctcggccccttccttggcccttggcccatccccaggagcctcgcccagctggagggctgcacccaaagcctcagacctgctgggggcccggggcccagggggaaccttccagggccgagatcttcgaggcggggcccatgcctcctcttcttccttgaaccccatgccaccatcgcagctgcagctctcaacggtggatgcccacgcccggacccctgtgctgcaggtgcaccccctggagagcccagccatgatcagcctcacaccacccaccaccgccactggggtcttctccctcaaggcccggcctggcctcccacctgggatcaacgtggccagcctggaatgggtgtccagggagccggcactgctctgcaccttcccaaatcccagtgcacccaggaaggacagcaccctttcggctgtgccccagagctcctacccactgctggcaaatggtgtctgcaagtggcccggatgtgagaaggtcttcgaagagccagaggacttcctcaagcactgccaggcggaccatcttctggatgagaagggcagggcacaatgtctcctccagagagagatggtacagtctctggagcagcagctggtgctggagaaggagaagctgagtgccatgcaggcccacctggctgggaaaatggcactgaccaaggcttcatctgtggcatcatccgacaagggctcctgctgcatcgtagctgctggcagccaaggccctgtcgtcccagcctggtctggcccccgggaggcccctgacagcctgtttgctgtccggaggcacctgtggggtagccatggaaacagcacattcccagagttcctccacaacatggactacttcaagttccacaacatgcgaccccctttcacctacgccacgctcatccgctgggccatcctggaggctccagagaagcagcggacactcaatgagatctaccactggttcacacgcatgtttgccttcttcagaaaccatcctgccacctggaagaacgccatccgccacaacctgagtctgcacaagtgctttgtgcgggtggagagcgagaagggggctgtgtggaccgtggatgagctggagttccgcaagaaacggagccagaggcccagcaggtgttccaaccctacacctggcccctgacctcaagatcaaggaaaggaggatggacgaacaggggccaaactggtgggaggcagaggtggtgggggcagggatgataggccctggatgtgcccacagggaccaagaagtgaggtttccactgtcttgcctgccagggcccctgttcccccgctggcagccaccccctcccccatcatatcctttgccccaaggctgctcagaggggccccggtcctggccccagcccccacctccgccccagacacaccccccagtcgagccctgcagccaaacagagccttcacaaccagccacacagagcctgcctcagctgctcgcacagattacttcagggctggaaaagtcacacagacacacaaaatgtcacaatcctgtccctcactcaacacaaaccccaaaacacagagagcctgcctcagtacactcaaacaacctcaaagctgcatcatcacacaatcacacacaagcacagccctgacaacccacacaccccaaggcacgcacccacagccagcctcagggcccacaggggcactgtcaacacaggggtgtgcccagaggcctacacagaagcagcgtcagtaccctcaggatctgaggtcccaacacgtgctcgctcacacacacggcctgttagaattcacctgtgtatctcacgcatatgcacacgcacagccccccagtgggtctcttgagtcccgtgcagacacacacagccacacacactgccttgccaaaaataccccgtgtctcccctgccactcacctcactcccattccctgagccctgatccatgcctcagcttagactgcagaggaactactcatttatttgggatccaaggcccccaacccacagtaccgtccccaataaactgcagccgagctcccc

SEQ ID NO: 45 - DNA, 2378 bp, Homo sapiens
  source 1..2378: mol_type = genomic DNA
acggccgccattttctttctttcttagctgttagctgagaggaagtctctgaacaggcggcagcggctcttatagtgcaaccatggcagactattcaacagtgcctcccccctcttctggctcagctggtggcggtggtggcggcggtggtggtggaggagttaacgacgctttcaaagatgcactgcagagagcccggcagattgcagcaaaaattggaggtgatgcagggacatcactgaattcaaatgactatggttatgggggacaaaaaagacctttagaagatggagatcaaccagatgctaagaaagttgctcctcaaaatgactcttttggaacacagttaccaccgatgcatcagcagcaaagcagatctgtaatgacagaagaatacaaagttccagatggaatggttggattcataattggcagaggaggtgaacagatctcacgcatacaacaggaatctggatgcaaaatacagatagctcctgacagtggtggccttccagaaaggtcctgtatgttaactggaacacctgaatctgtccagtcagcaaaacggttactggaccagattgttgaaaaaggaagaccagctcctggcttccatcatggcgatggaccgggaaatgcagttcaagaaatcatgattccagctagcaaggcaggattagtcattggaaaagggggagaaactattaaacagcttcaggaacgggctggagttaaaatggttatgattcaagacgggccgcagaacactggtgctgacaaacctcttaggattacaggagacccatataaagttcaacaagccaaggaaatggtgttagagttaattcgtgatcaaggcggtttcagagaagttcggaatgagtatgggtcaagaataggaggaaatgaagggatagatgtccccattccaagatttgctgttggcattgtaataggaagaaatggagagatgatcaaaaaaatacaaaatgatgctggtgttcgcattcagtttaagccagatgatgggacaacacccgaaaggatagcacaaataacaggacctccagaccgatgtcaacatgctgcagaaattattacagaccttcttcgaagtgttcaggctggtaatcctggtggacctggacctggtggtcgaggaagaggtagaggtcaaggcaactggaacatgggaccacctggtggactacaggaatttaattttattgtgccaactgggaaaactggattaataataggaaaaggaggtgaaaccataaaaagcataagccagcagtctggtgcaagaatagaacttcagagaaatcctccaccaaatgcagatcctaatatgaagttatttacaattcgtggcactccacaacagatagactatgctcggcaactcatagaagaaaagattggtggcccagtaaatcctttagggccacctgtaccccatgggccccatggtgtcccaggcccccatggacctcctgggcctccagggcctggaactccaatgggaccatacaaccctgcaccttataatcctggaccaccaggcccggctcctcatggtcctccagccccatatgctccccagggatggggaaatgcatatccacactggcagcagcaggctcctcctgatccagctaaggcaggaacggatccaaattcagcagcttgggctgcttattacgctcactattatcaacagcaagcacagccaccaccagcagcccctgcaggtgcaccaactacaactcaaactaatggacaaggagatcagcagaatccagccccagctggacaggttgattataccaaggcttgggaagagtactacaagaaaatgggtcaggcagttcctgctccgactggggctcctccaggtggtcagccagattatagtgcagcctgggctgagtattatagacaacaagcagcctattatgcccagacaagtccccagggaatgccacagcatcctccagcacctcagggccaataataagaagtggacaatacagtatttgcttcattgtgtgggggaaaaaaacctttgttaaatatatggatgcagacgacttgatgaagatcttaattttgtttttggtttaaaatagtgtttccttttttttttttttttttgaaaatgtacaaaatatctatcactactgataggaggttaatatttctgtgtagaaatgaaaattggtttgtttttagtatttagtgtagatgtacacattccagcaaatgtatttgcaattatgtggttgatgctttgtgatataaatgtactttttcaatgtatactttcacttttaaaatgcctgttttgtgctttacaataaatgatatgaaacctc

SEQ ID NO: 46 - DNA, 2650 bp, Homo sapiens
  source 1..2650: mol_type = genomic DNA
gcgagacagagcgagcaacgcaatctgaccgagcaggtcgtacgccgccgcctcctcctcctctctgctcttcgctacccaggtgacccgaggagggactccgcctccgagcggctgaggaccccggtgcagaggagcctggctcgcagaattgcagagtcgtcgcccctttttacaacctggtcccgttttattctgccgtacccagtttttggatttttgtcttccccttcttctctttgctaaacgacccctccaagataatttttaaaaaaccttctcctttgctcacctttgcttcccagccttcccatccccccaccgaaagcaaatcattcaacgacccccgaccctccgacggcaggagccccccgacctcccaggcggaccgccctccctccccgcgcgcgggttccgggcccggcgagagggcgcgagcacagccgaggccatggaggtgacggcggaccagccgcgctgggtgagccaccaccaccccgccgtgctcaacgggcagcacccggacacgcaccacccgggcctcagccactcctacatggacgcggcgcagtacccgctgccggaggaggtggatgtgctttttaacatcgacggtcaaggcaaccacgtcccgccctactacggaaactcggtcagggccacggtgcagaggtaccctccgacccaccacgggagccaggtgtgccgcccgcctctgcttcatggatccctaccctggctggacggcggcaaagccctgggcagccaccacaccgcctccccctggaatctcagccccttctccaagacgtccatccaccacggctccccggggcccctctccgtctaccccccggcctcgtcctcctccttgtcggggggccacgccagcccgcacctcttcaccttcccgcccaccccgccgaaggacgtctccccggacccatcgctgtccaccccaggctcggccggctcggcccggcaggacgagaaagagtgcctcaagtaccaggtgcccctgcccgacagcatgaagctggagtcgtcccactcccgtggcagcatgaccgccctgggtggagcctcctcgtcgacccaccaccccatcaccacctacccgccctacgtgcccgagtacagctccggactcttcccccccagcagcctgctgggcggctcccccaccggcttcggatgcaagtccaggcccaaggcccggtccagcacaggcagggagtgtgtgaactgtggggcaacctcgaccccactgtggcggcgagatggcacgggacactacctgtgcaacgcctgcgggctctatcacaaaatgaacggacagaaccggcccctcattaagcccaagcgaaggctgtctgcagccaggagagcagggacgtcctgtgcgaactgtcagaccaccacaaccacactctggaggaggaatgccaatggggaccctgtctgcaatgcctgtgggctctactacaagcttcacaatattaacagacccctgactatgaagaaggaaggcatccagaccagaaaccgaaaaatgtctagcaaatccaaaaagtgcaaaaaagtgcatgactcactggaggacttccccaagaacagctcgtttaacccggccgccctctccagacacatgtcctccctgagccacatctcgcccttcagccactccagccacatgctgaccacgcccacgccgatgcacccgccatccagcctgtcctttggaccacaccacccctccagcatggtcaccgccatgggttagagccctgctcgatgctcacagggcccccagcgagagtccctgcagtccctttcgacttgcatttttgcaggagcagtatcatgaagcctaaacgcgatggatatatgtttttgaaggcagaaagcaaaattatgtttgccactttgcaaaggagctcactgtggtgtctgtgttccaaccactgaatctggaccccatctgtgaataagccattctgactcatatcccctatttaacagggtctctagtgctgtgaaaaaaaaaatgctgaacattgcatataacttatattgtaagaaatactgtacaatgactttattgcatctgggtagctgtaaggcatgaaggatgccaagaagtttaaggaatatgggagaaatagtgtggaaattaagaagaaactaggtctgatattcaaatggacaaactgccagttttgtttcctttcactggccacagttgtttgatgcattaaaagaaaataaaaaaaagaaaaaagagaaaagaaaaaaaaagaaaaaagttgtaggcgaatcatttgttcaaagctgttggcctctgcaaaggaaataccagttctgggcaatcagtgttaccgttcaccagttgccgttgagggtttcagagagcctttttctaggcctacatgctttgtgaacaagtccctgtaattgttgtttgtatgtataattcaaagcaccaaaataagaaaagatgtagatttatttcatcatattatacagaccgaactgttgtataaatttatttactgctagtcttaagaactgctttctttcgtttgtttgtttcaatattttccttctctctcaatttttggttgaataaactagattacattcagttggc

SEQ ID NO: 47 - DNA, 1607 bp, Homo sapiens
  source 1..1607: mol_type = genomic DNA
tcccctctcgaggacctgggttggccagcccagctttgtacgggtgactgaagtccacatcgacgtaacagttgaaagggaaggacgcggagaccacccggtacccgccccaggcgtttccagagtctccgcttaggcggcccgtgggggtcggggtcgcggtcgcggtcgcggaccggggacagagcaatggggcgggcgcgcagcgccggctgcactcccagagcctcccaccgccgccccacggccgcctagcgcgcgccgggactgcatttcccataggcccacgctgcggagcaccgcccacccgagtctcacgcgagtgcgctgccgcgaggtgtccctgccgcagcccccgcccgcccgcagagcttttgaaaggcggcgggaggcggcgagcgccatggccagtccgggctgcctgctgtgcgtgctgggcctgctactctgcggggcggcgagcctcgagctgtctagaccccacggcgacaccgccaagaagcccatcatcggaatattaatgcaaaaatgccgtaataaagtcatgaaaaactatggaagatactatattgctgcgtcctatgtaaagtacttggagtctgcaggtgcgagagttgtaccagtaaggctggatcttacagagaaagactatgaaatacttttcaaatctattaatggaatccttttccctggaggaagtgttgacctcagacgctcagattatgctaaagtggccaaaatattttataacttgtccatacagagttttgatgatggagactattttcctgtgtggggcacatgccttggatttgaagagctttcactgctgattagtggagagtgcttattaactgccacagatactgttgacgtggcaatgccgctgaacttcactggaggtcaattgcacagcagaatgttccagaattttcctactgagttgttgctgtcattagcagtagaacctctgactgccaatttccataagtggagcctctccgtgaagaattttacaatgaatgaaaagttaaagaagtttttcaatgtcttaactacaaatacagatggcaagattgagtttatttcaacaatggaaggatataagtatccagtatatggtgtccagtggcatccagagaaagcaccttatgagtggaagaatttggatggcatttcccatgcacctaatgctgtgaaaaccgcattttatttagcagagttttttgttaatgaagctcggaaaaacaaccatcattttaaatctgaatctgaagaggagaaagcattgatttatcagttcagtccaatttatactggaaatatttcttcatttcagcaatgttacatatttgattgaaagtcttcaatttgttaacagagcaaatttgaataattccatgattaaactgttagaataacttgctactcatggcaagattaggaagtcacagattcttttctataatgtgcctggctctgattcttcattctgtatgtgactatttatataacattagataattaaatagtgagacataaatagagtgtttttcatggaaaagccttcttatatctgaagattgaaaaaaataaatttactgaaa

SEQ ID NO: 48 - DNA, 1211 bp, Homo sapiens
  source 1..1211: mol_type = genomic DNA
gtaagcactttatgcttccccagaggtgactaaactctgatcattgccaatgggcaggcactccccaaatgtccaaggacaacaaagatacccagagtgtctttcatagctaccaatgattaaatagcaagtattgcattcctgggcattgctaactagtgaagtataccagatggaaatgtcttcgaagctgtccctttaaaactcgagcaagctaccaggcaaactccgcctccagggaggttccttattaaataggagccaactggctgggtcggggctcaataccccaagcaatacctgcaactgaggattcttcccggggagaccgcagcccatcggcatggctcaagagtttgtgaactgcaaaatccagcctgggaaggtggttgtgttcatcaagcccacctgcccgtactgcaggagggcccaagagatcctcagtcaattgcccatcaaacaagggcttctggaatttgtcgatatcacagccaccaaccacactaacgagattcaagattatttgcaacagctcacgggagcaagaacggtgcctcgagtctttattggtaaagattgtataggcggatgcagtgatctagtctctttgcaacagagtggggaactgctgacgcggctaaagcagattggagctctgcagtaaccacagatctcataggaaatgttcaacaattctgtgaaaggtcacaggacccaattggagaaatcatatgaaaagcatagttggtcttggtgtcatatggatcagaggcacaagtgcagaggctgtggtcatgcggaacactctgttatttaagatggctatccagataatcctgaacactgtgtatttattttatttagactaccagcaaagattaaagcatgaaatgtaaaacatctgataaaacttacagccccctacaccaagagtgtatctgtgaaagagctcctacactttgaaaacttaagaatcccttatcatgaagtttgcctgttctagaattgtaagattgttaatttccttcaatctctagtgacaacacttaatttcttttctaataaaaaaaacctatagatgattcagtgatttttgtccaattcatttgcatgttctcaagacattaaggaatgttatgcgaaatacactaacttaaaactgtgtttatatttggccctgccattataaataaagacacgtgctgctgtca

SEQ ID NO: 49 - DNA, 4922 bp, Homo sapiens
  source 1..4922: mol_type = genomic DNA
gctccggggccaccgcccctccggggccgggcccgccctccttccctccctccctcccccgctgtcctggcccgccctgcccggcccgccctgcgagtcagttcgctggttccctccctccctgggcgcgctcgggccgccgccgcgctccccgccctcgagcctcggtgccggagccgcccgccgccggaggaggaggtggagggagccggaggggcccgccgaggcggcggcggcggcggcaagatggcggacttcctgccgtcgcggtccgtgctgtccgtgtgcttccccggctgcctgctgacgagtggcgaggccgagcagcaacgcaagtccaaggagatcgacaaatgcctgtctcgggaaaagacctatgtgaagcggctggtgaagatcctgctgctgggcgcgggcgagagcggcaagtccaccttcctgaagcagatgcggatcatccacgggcaggacttcgaccagcgcgcgcgcgaggagttccgccccaccatctacagcaacgtgatcaaaggtatgagggtgctggttgatgctcgagagaagcttcatattccctggggagacaactcaaaccaacaacatggagataagatgatgtcgtttgatacccgggcccccatggcagcccaaggaatggtggaaacaagggttttcttacaatatcttcctgctataagagcattatgggcagacagcggcatacagaatgcctatgaccggcgtcgagaatttcaactgggtgaatctgtaaaatatttcctggataacttggataaacttggagaaccagattatattccatcacaacaagatattctgcttgccagaagacccaccaaaggcatccatgaatacgactttgaaataaaaaatgttcctttcaaaatggttgatgtaggtggtcagagatcagaaaggaaacgttggtttgaatgtttcgacagtgtgacatcaatacttttccttgtttcctcaagtgaatttgaccaggtgcttatggaagatcgactgaccaatcgccttacagagtctctgaacatttttgaaacaatcgtcaataaccgggttttcagcaatgtctccataattctgttcttaaacaagacagacttgcttgaggagaaggtgcaaattgtgagcatcaaagactatttcctagaatttgaaggggatccccactgcttaagagacgtccaaaaattcctggtggaatgtttccggaacaaacgccgggaccagcaacagaagcccttataccaccacttcaccactgctatcaacacggagaacatccgccttgttttccgtgacgtgaaggatactattctgcatgacaacctcaagcagcttatgctacagtgatgtacaaaagacttgctgttttaatatctttttgtgtttttgatgttttctgtttgttttgttttttaaaatagcagtttacaaccagaattagaacaatcttaattctacgtttaacttcttgaaaatcttagtactttttctgcggcctttggtttgtggctgaaagctgttgagtgactcatcgccaagatttgctgtaatgcaggctttgatctgtttcaccatggcttctattcaagtccagttaaaacctcccagctgacctcagactaggcatatttcaggctttaaattattctactttccaaactgaattctcctgcagtgccaagtatcaaaggtgtccttaaatacttgtagggatgaggttaggaatattcagttccaaaacaagatatcttctgtccgccttacatatagcagtgacacttgttgcctaactttatggtgacctcctattttgtaagggctgttagaagttctatctaagaaatggcattctgtaggtttatagaaggtttagccttcatattttaattgcttgtatacacaacagctgttttgcttttagatttctgtgtttctgaaggtaatgttcttcctgttttcaagtttacataaggatctttggtctgatgctgatgaagagttcacaggtggtatgggagagcaaaaggcaagctaatgctgtttaccgtgttttggtcaaacgtaacgagtgaaatagaatttgcctttctcatatttaattatcatgtagtttaatgtaccatatgtgaaacattctggccatagcagcaactaaaaactgcaagcaacttggtaacagaactttctaaataaacttaacctgttccagaatgtcatgtatttgacttttaagccctatctcagttggtcagtaaagaccaatccttactgtaggaaatcattgttgtatcatcacaaacatctatcttttgctgtcctgtccagtcccatcaactccacactgtgccatttgtggcatcgttttgtttatttggagtttgctaagggcagtatttttctgtcaagactattcaagaaggcattatttgagattcctgttcattcttggtgtgtctctaacagatacagtatgtatacatttgtataattgttgttgttgaaagtccagcttttttgaggtatattttaaatgttttaaggatgcttctaaggatcagtagtaatttttttagttcgcacctaaagatgattacattgacctcccccgactgcttaccaaattaaaatgtgtccacgaagtagctttgtgatcgcagatacattcatagtgaactcatcagaatggctggtttgcagtactgaaatactatcttctaggctgtatgtagtgctacaattagagaaacagaagtccaaggctggcgacagcttgaaaagtctgacagcttttctacttttcctgaaaattttaagactgtgatatctgtcattttactgtatagctgactgtgtactcaggtattttattggtccttgaaagattggtcgttatggatcacccagcctttccaagtcagtggctgttgttctgtcttgctgtctgatacgagagtggggcttttcagtgaactaaccagggattgttcttgacatacctgacttttctcacatttgaacttccactatcattgtatccatataacttctagcattttcatgccatggtaatccatgagctacacatacgtagcccggcaccgtgatgcaagttcatggtatcgtgcatgttcgtggtatcatggtatcattcatgcgtgtttgaatagttctacatctagtgcttcttgccaaaaagaatacattgtttaaattcacaaaattagcataattgcagtgctaatgaatatcggaatatgtgcacagtaacatttggactattcattggagagtttacccatacatttagcaaattgaatggccaaaacatttgactccagtgagggctcaagttagatccctatagaaagaggacacttcatcttacttaagtcatagttaagatctgtgatacgaaccatagatattgcctgacaaagcagaaatcaccaagtttcccccttttgaattaccaccaagaagtgttgaaacaccaaatagatatcatgttattttgggcatttgcagttttcttccctgctgcatgtaatgtctcagaatcaacattcttttaaaatctagactatattttgaggcaatgaattacttatattcaacttaggcttgttttgacattcagtagaactttaagttcaatctaaaggcttcagtccacatttttttatacgttgtattttaaaaacgtttgaaaggagtcttacacctgtatcatgaaaactgaatccttttgaaataccactatatgaagagagagatgaaatttagtgaacagaattgaaaaggtgctcataatttcactatgcaaacttaccccagtctctaaaaaagtaatttagatttaaagttctttgatgtatttgattttctaaatctttatggttatgatttggaataaaatgtgcctaatcctgtgttacattctgttcttaaatctgaatgccttctcatttaattctgaggaaatatcacacaagtgtcttcattgaccttgaagaaatgtatatacagttgccttataaaacaacataaatttagaccataacttttatagagaaagggttttgtcaaatgttttctgaaaatctgagtaattcaaagcatgcctctgcccctttaatatttttaataacctgcattgttgctgtctgccaaatattaaattgaaatcttcatttcaattttattatctggaaagggcactggattgctctgcaaccaaagaaagcaatatggaatgaaaaaactcattcacttttgtcttattttcttttaaggtgtattggcatgtaatttgcatagagaaggtcctctggttagtctctcaaattgaggctgtttagggaaatccttattcagttggtggcagtggttggtttaaagtagaaggaaataagatcgccttaataccagaaatgattagaagtgctgatttagattcaacaaataccatatgtccttatcattttttgtaagaagaaattggttaagtcctaactttcaatgtgtacccaaatacttgtatttatgcttttgataaaatgtattttcagcattaatacacatccgattatgccttatttatatatgaagaataaagttaccatgttacactgttatgtcctaaaattcaaatcactatttgagaaaccctcaaattggtgctttcattatataatgatacatttagacaaaaccccaaactaagccatttgaaacaagattctctccattgcagtttgtagcaatgttatttctgtgtatgtcatgagaaggctaaatatcagtgttaatttcttgtttgaatccgtgaaatcatgcctgtaaagcccaaacatttgtaacaaactccctaataaatttagagaaagtca

SEQ ID NO: 50 - DNA, 2907 bp, Homo sapiens
  source 1..2907: mol_type = genomic DNA
agaatattagaacagagagccatgcatgtattatctaatacaattttctcattttataaattatataaatgaggaaactgagactcagcaaggttataggatacaacctaatctgtgttagaagaaggatgagagtgaggcttatgctgggagttgctatggtctgtaaatgtgaggataaggaacatgccattcactgttgtgttccacttcctagtccagtgcctggtgcaaagtaggggcttcataaactttggtcacaggcctgatgaagggactgatttgagtgaatgaatccatggatgatgcatctgtactttgtgttccccgctagtcagatggactcggacatgctccatttcaggtgtatctcatctgagacattattagagggttctctttatgtgccatgactgagtagcgttttcttccactgaagtattgcttcctctttgttgatatcacaggacagacatcagaacacttacaggatgtgtgtagtgtggcatgacagagaactttggtttcctttaatgtgactgtagacctggcagtgttactataagaatcactggcaatcagacacccgggtgtgctgagctagcactcagtgggggcggctactgctcatgtgattgtggagtagacagttggaagaagtacccagtccatttggagagttaaaactgtgcctaacagaggtgtcctctgacttttcttctgcaagctccatgttttcacatcttccctttgactgtgtcctgctgctgctgctgctactacttacaaggtcctcagaagtggaatacagagcggaggtcggtcagaatgcctatctgccctgcttctacaccccagccgccccagggaacctcgtgcccgtctgctggggcaaaggagcctgtcctgtgtttgaatgtggcaacgtggtgctcaggactgatgaaagggatgtgaattattggacatccagatactggctaaatggggatttccgcaaaggagatgtgtccctgaccatagagaatgtgactctagcagacagtgggatctactgctgccggatccaaatcccaggcataatgaatgatgaaaaatttaacctgaagttggtcatcaaaccagccaaggtcacccctgcaccgactcggcagagagacttcactgcagcctttccaaggatgcttaccaccaggggacatggcccagcagagacacagacactggggagcctccctgatataaatctaacacaaatatccacattggccaatgagttacgggactctagattggccaatgacttacgggactctggagcaaccatcagaataggcatctacatcggagcagggatctgtgctgggctggctctggctcttatcttcggcgctttaattttcaaatggtattctcatagcaaagagaagatacagaatttaagcctcatctctttggccaacctccctccctcaggattggcaaatgcagtagcagagggaattcgctcagaagaaaacatctataccattgaagagaacgtatatgaagtggaggagcccaatgagtattattgctatgtcagcagcaggcagcaaccctcacaacctttgggttgtcgctttgcaatgccatagatccaaccaccttatttttgagcttggtgttttgtctttttcagaaactatgagctgtgtcacctgactggttttggaggttctgtccactgctatggagcagagttttcccattttcagaagataatgactcacatgggaattgaactgggacctgcactgaacttaaacaggcatgtcattgcctctgtatttaagccaacagagttacccaacccagagactgttaatcatggatgttagagctcaaacgggcttttatatacactaggaattcttgacgtggggtctctggagctccaggaaattcgggcacatcatatgtccatgaaacttcagataaactagggaaaactgggtgctgaggtgaaagcataacttttttggcacagaaagtctaaaggggccactgattttcaaagagatctgtgatccctttttgttttttgtttttgagatggagtcttgctctgttgcccaggctggagtgcaatggcacaatctcggctcactgcaagctccgcctcctgggttcaagcgattctcctgcctcagcctcctgagtggctgggattacaggcatgcaccaccatgcccagctaatttgttgtatttttagtagagacagggtttcaccatgttggccagtgtggtctcaaactcctgacctcatgatttgcctgcctcggcctcccaaagcactgggattacaggcgtgagccaccacatccagccagtgatccttaaaagattaagagatgactggaccaggtctaccttgatcttgaagattcccttggaatgttgagatttaggcttatttgagcactgcctgcccaactgtcagtgccagtgcatagcccttcttttgtctcccttatgaagactgccctgcagggctgagatgtggcaggagctcccagggaaaaacgaagtgcatttgattggtgtgtattggccaagttttgcttgttgtgtgcttgaaagaaaatatctctgaccaacttctgtattcgtggaccaaactgaagctatatttttcacagaagaagaagcagtgacggggacacaaattctgttgcctggtggaaagaaggcaaaggccttcagcaatctatattaccagcgctggatcctttgacagagagtggtccctaaacttaaatttcaagacggtataggcttgatctgtcttgcttattgttgccccctgcgcctagcacaattctgacacacaattggaacttactaaaaatttttttttactgtt

SEQ ID NO: 51 - DNA, 3919 bp, Homo sapiens
  source 1..3919: mol_type = genomic DNA
gacaggaggatcaccctcttcgtcgcttcggccagtgtgtcgggctgggccctgacaagccacctgaggagaggctcggagccgggcccggaccccggcgattgccgcccgcttctctctagtctcacgaggggtttcccgcctcgcacccccacctctggacttgcctttccttctcttctccgcgtgtggagggagccagcgcttaggccggagcgagcctgggggccgcccgccgtgaagacatcgcggggaccgattcaccatggagggcgccggcggcgcgaacgacaagaaaaagataagttctgaacgtcgaaaagaaaagtctcgagatgcagccagatctcggcgaagtaaagaatctgaagttttttatgagcttgctcatcagttgccacttccacataatgtgagttcgcatcttgataaggcctctgtgatgaggcttaccatcagctatttgcgtgtgaggaaacttctggatgctggtgatttggatattgaagatgacatgaaagcacagatgaattgcttttatttgaaagccttggatggttttgttatggttctcacagatgatggtgacatgatttacatttctgataatgtgaacaaatacatgggattaactcagtttgaactaactggacacagtgtgtttgattttactcatccatgtgaccatgaggaaatgagagaaatgcttacacacagaaatggccttgtgaaaaagggtaaagaacaaaacacacagcgaagcttttttctcagaatgaagtgtaccctaactagccgaggaagaactatgaacataaagtctgcaacatggaaggtattgcactgcacaggccacattcacgtatatgataccaacagtaaccaacctcagtgtgggtataagaaaccacctatgacctgcttggtgctgatttgtgaacccattcctcacccatcaaatattgaaattcctttagatagcaagactttcctcagtcgacacagcctggatatgaaattttcttattgtgatgaaagaattaccgaattgatgggatatgagccagaagaacttttaggccgctcaatttatgaatattatcatgctttggactctgatcatctgaccaaaactcatcatgatatgtttactaaaggacaagtcaccacaggacagtacaggatgcttgccaaaagaggtggatatgtctgggttgaaactcaagcaactgtcatatataacaccaagaattctcaaccacagtgcattgtatgtgtgaattacgttgtgagtggtattattcagcacgacttgattttctcccttcaacaaacagaatgtgtccttaaaccggttgaatcttcagatatgaaaatgactcagctattcaccaaagttgaatcagaagatacaagtagcctctttgacaaacttaagaaggaacctgatgctttaactttgctggccccagccgctggagacacaatcatatctttagattttggcagcaacgacacagaaactgatgaccagcaacttgaggaagtaccattatataatgatgtaatgctcccctcacccaacgaaaaattacagaatataaatttggcaatgtctccattacccaccgctgaaacgccaaagccacttcgaagtagtgctgaccctgcactcaatcaagaagttgcattaaaattagaaccaaatccagagtcactggaactttcttttaccatgccccagattcaggatcagacacctagtccttccgatggaagcactagacaaagttcacctgagcctaatagtcccagtgaatattgtttttatgtggatagtgatatggtcaatgaattcaagttggaattggtagaaaaactttttgctgaagacacagaagcaaagaacccattttctactcaggacacagatttagacttggagatgttagctccctatatcccaatggatgatgacttccagttacgttccttcgatcagttgtcaccattagaaagcagttccgcaagccctgaaagcgcaagtcctcaaagcacagttacagtattccagcagactcaaatacaagaacctactgctaatgccaccactaccactgccaccactgatgaattaaaaacagtgacaaaagaccgtatggaagacattaaaatattgattgcatctccatctcctacccacatacataaagaaactactagtgccacatcatcaccatatagagatactcaaagtcggacagcctcaccaaacagagcaggaaaaggagtcatagaacagacagaaaaatctcatccaagaagccctaacgtgttatctgtcgctttgagtcaaagaactacagttcctgaggaagaactaaatccaaagatactagctttgcagaatgctcagagaaagcgaaaaatggaacatgatggttcactttttcaagcagtaggaattggaacattattacagcagccagacgatcatgcagctactacatcactttcttggaaacgtgtaaaaggatgcaaatctagtgaacagaatggaatggagcaaaagacaattattttaataccctctgatttagcatgtagactgctggggcaatcaatggatgaaagtggattaccacagctgaccagttatgattgtgaagttaatgctcctatacaaggcagcagaaacctactgcagggtgaagaattactcagagctttggatcaagttaactgagctttttcttaatttcattcctttttttggacactggtggctcattacctaaagcagtctatttatattttctacatctaattttagaagcctggctacaatactgcacaaacttggttagttcaattttgatcccctttctacttaatttacattaatgctcttttttagtatgttctttaatgctggatcacagacagctcattttctcagttttttggtatttaaaccattgcattgcagtagcatcattttaaaaaatgcacctttttatttatttatttttggctagggagtttatccctttttcgaattatttttaagaagatgccaatataatttttgtaagaaggcagtaacctttcatcatgatcataggcagttgaaaaatttttacaccttttttttcacattttacataaataataatgctttgccagcagtacgtggtagccacaattgcacaatatattttcttaaaaaataccagcagttactcatggaatatattctgcgtttataaaactagtttttaagaagaaattttttttggcctatgaaattgttaaacctggaacatgacattgttaatcatataataatgattcttaaatgctgtatggtttattatttaaatgggtaaagccatttacataatatagaaagatatgcatatatctagaaggtatgtggcatttatttggataaaattctcaattcagagaaatcatctgatgtttctatagtcactttgccagctcaaaagaaaacaataccctatgtagttgtggaagtttatgctaatattgtgtaactgatattaaacctaaatgttctgcctaccctgttggtataaagatattttgagcagactgtaaacaagaaaaaaaaaatcatgcattcttagcaaaattgcctagtatgttaatttgctcaaaatacaatgtttgattttatgcactttgtcgctattaacatcctttttttcatgtagatttcaataattgagtaattttagaagcattattttaggaatatatagttgtcacagtaaatatcttgttttttctatgtacattgtacaaatttttcattccttttgctctttgtggttggatctaacactaactgtattgttttgttacatcaaataaacatcttctgtggaccagg

SEQ ID NO: 52 - DNA, 1362 bp, Homo sapiens
  source 1..1362: mol_type = genomic DNA
ggggacgaagggaagctccagcgtgtggccccggcgagtgcggataaaagccgccccgccgggctcgggcttcattctgagccgagcccggtgccaagcgcagctagctcagcaggcggcagcggcggcctgagcttcagggcagccagctccctcccggtctcgccttccctcgcggtcagcatgaaagccttcagtcccgtgaggtccgttaggaaaaacagcctgtcggaccacagcctgggcatctcccggagcaaaacccctgtggacgacccgatgagcctgctatacaacatgaacgactgctactccaagctcaaggagctggtgcccagcatcccccagaacaagaaggtgagcaagatggaaatcctgcagcacgtcatcgactacatcttggacctgcagatcgccctggactcgcatcccactattgtcagcctgcatcaccagagacccgggcagaaccaggcgtccaggacgccgctgaccaccctcaacacggatatcagcatcctgtccttgcaggcttctgaattcccttctgagttaatgtcaaatgacagcaaagcactgtgtggctgaataagcggtgttcatgatttcttttattctttgcacaacaacaacaacaacaaattcacggaatcttttaagtgctgaacttatttttcaaccatttcacaaggaggacaagttgaatggacctttttaaaaagaaaaaaaaaatggaaggaaaactaagaatgatcatcttcccagggtgttctcttacttggactgtgatattcgttatttatgaaaaagacttttaaatgccctttctgcagttggaaggttttctttatatactattcccaccatggggagcgaaaacgttaaaatcacaaggaattgcccaatctaagcagactttgccttttttcaaaggtggagcgtgaataccagaaggatccagtattcagtcacttaaatgaagtcttttggtcagaaattacctttttgacacaagcctactgaatgctgtgtatatatttatatataaatatatctatttgagtgaaaccttgtgaactctttaattagagttttcttgtatagtggcagagatgtctatttctgcattcaaaagtgtaatgatgtacttattcatgctaaactttttataaaagtttagttgtaaacttaacccttttatacaaaataaatcaagtgtgtttattgaatggtgattgcctgctttatttcagaggaccagtgctttgatttttattatgctatgttataactgaacccaaataaatacaagttcaaatttatgtagactgtataagattataataaaacatgtctgaagtc

SEQ ID NO: 53 - DNA, 6139 bp, Homo sapiens
  source 1..6139: mol_type = genomic DNA
agaagaggcggcgcgtgcgtagaggggcggtgagagctaagaggggcagcgcgtgtgcagaggggcggtgtgacttaggacggggcgatggcggctgagaggagctgcgcgtgcgcgaacatgtaactggtgggatctgcggcggctcccagatgatggtcgtcctcctgggcgcgacgaccctagtgctcgtcgccgtggcgccatgggtgttgtccgcagccgcaggtggaaaaaatctaaaatctcctcaaaaagtagaggtcgacatcatagatgacaactttatcctgaggtggaacaggagcgatgagtctgtcgggaatgtgactttttcattcgattatcaaaaaactgggatggataattggataaaattgtctgggtgtcagaatattactagtaccaaatgcaacttttcttcactcaagctgaatgtttatgaagaaattaaattgcgtataagagcagaaaaagaaaacacttcttcatggtatgaggttgactcatttacaccatttcgcaaagctcagattggtcctccagaagtacatttagaagctgaagataaggcaatagtgatacacatctctcctggaacaaaagatagtgttatgtgggctttggatggtttaagctttacatatagcttagttatctggaaaaactcttcaggtgtagaagaaaggattgaaaatatttattccagacataaaatttataaactctcaccagagactacttattgtctaaaagttaaagcagcactacttacgtcatggaaaattggtgtctatagtccagtacattgtataaagaccacagttgaaaatgaactacctccaccagaaaatatagaagtcagtgtccaaaatcagaactatgttcttaaatgggattatacatatgcaaacatgacctttcaagttcagtggctccacgcctttttaaaaaggaatcctggaaaccatttgtataaatggaaacaaatacctgactgtgaaaatgtcaaaactacccagtgtgtctttcctcaaaacgttttccaaaaaggaatttaccttctccgcgtacaagcatctgatggaaataacacatctttttggtctgaagagataaagtttgatactgaaatacaagctttcctacttcctccagtctttaacattagatcccttagtgattcattccatatctatatcggtgctccaaaacagtctggaaacacgcctgtgatccaggattatccactgatttatgaaattattttttgggaaaacacttcaaatgctgagagaaaaattatcgagaaaaaaactgatgttacagttcctaatttgaaaccactgactgtatattgtgtgaaagccagagcacacaccatggatgaaaagctgaataaaagcagtgtttttagtgacgctgtatgtgagaaaacaaaaccaggaaatacctctaaaatttggcttatagttggaatttgtattgcattatttgctctcccgtttgtcatttatgctgcgaaagtcttcttgagatgcatcaattatgtcttctttccatcacttaaaccttcttccagtatagatgagtatttctctgaacagccattgaagaatcttctgctttcaacttctgaggaacaaatcgaaaaatgtttcataattgaaaatataagcacaattgctacagtagaagaaactaatcaaactgatgaagatcataaaaaatacagttcccaaactagccaagattcaggaaattattctaatgaagatgaaagcgaaagtaaaacaagtgaagaactacagcaggactttgtatgaccagaaatgaactgtgtcaagtataaggtttttcagcaggagttacactgggagcctgaggtcctcaccttcctctcagtaactacagagaggacgtttccctgtttagggaaagaaaaaacatcttcagatcataggtcctaaaaatacgggcaagctcttaactatttaaaaatgaaattacaggcccgggcacggtggctcacacctgtaatcccagcactttgggaggctgaggcaggcagatcatgaggtcaagagatcgagaccagcctggccaacgtggtgaaaccccatctctactaaaaatacaaaaattagccgggtgtggtggcgcgcgcctgttgtcttagctactcaggaggctgaggcaggagaatcgcttgaaaacaggaggtggaggttgcagtgagccgagatcacgccactgcactccagcctggtgacagcgtgagactctttaaaaaaagaaattaaaagagttgagacaaacgtttcctacattcttttccatgtgtaaaatcatgaaaaagcctgtcaccggacttgcattggatgagatgagtcagaccaaaacagtggccacccgtcttcctcctgtgagcctaagtgcagccgtgctagctgcgcaccgtggctaaggatgacgtctgtgttcctgtccatcactgatgctgctggctactgcatgtgccacacctgtctgttcgccattcctaacattctgtttcattcttcctcgggagatatttcaaacatttggtcttttcttttaacactgagggtaggcccttaggaaatttatttaggaaagtctgaacacgttatcacttggttttctggaaagtagcttaccctagaaaacagctgcaaatgccagaaagatgatccctaaaaatgttgagggacttctgttcattcatcccgagaacattggcttccacatcacagtatctacccttacatggtttaggattaaagccaggcaatcttttactatgcattaagacctctgattcaaaacttattagaacagtagcttctgctggaatttgcaatcactgaagtcatagaaaataggtaactatctaattagagaaataattgttgtattttaagatctgagagtgtgtacaagttttagtatacatgccatgccagaagatagtgtatgcaagaagtcttgggaccagaaaatggcaatgataggagactgacatagaagaagaatgcttccctaggaaaaaggtcgctggctttggtgcaagaggaagaagaatgttccactggaagcctgagcacctaatcagctctcagtgatcaacccactcttgttatgggtggtctctgtcactttgaatgccaggctggcttctcgtctagcagtattcagataccccttctgctcagcctgcttggcgttaaaatacaaatcattgaactgagggggaaaaatgtaactaggaagaaaaacccaatttaagaaattacataatgctttccaaaggcacctacaacttagttttaaattacttgctactggggattacccatggatatccttaataggcaggaagtctgggaattctggtggcctctagggcagtgttctcacagcaccgttccgacagggaccagtgaaagaaaagagacaaagttagaacgtgctggggagcggccatttctaaggccagtctggtttaagtagtcatttctgctgaaaaaacagatgatcctggtggaagaaaaggttgaaggcagctgccctcgggagggctgtgatgctcggcacatcctgcctggcacatacacgtgtctgcaggccacaccgtgcatgtccccagacctgccgcctggcttctggagtgcttcaagcagagcatggtgggtcattgaggagacccaggaatctcatctgagaacccactctctgccggagaaccccatggtgacacattttcatctttctgaccagaggctgtttttttttttttttgagacagtctcattctgttgcccaggctggagtgcagtggcttgatctcggctcactgcaacctcgcctcccgggttcaagcaattctctgccgcagcctccagagtagctgggataacaggtgcccaccaccacaccccactaatttttgtatttgtatttttagtagagatggggtttcaccatgttggtcaggctggtcttggactcctgacctcatgctccacccgcttcggcctcccaaagttctgggattacaggtgtgagccaccgtgcacggccggcctgacctttggaaaagccttgtcactttggacgtttgcgtctttgaagaggcgatgggagcatatcatgactgcctgccaccattgcttttcagactaccacaactcaatcatgctgtccaggacttctggccctgtgttcaccactgggaaaacgtacttcagactggatagcctaaaaaggagcaatgcccttgtaggatgtggagaagggaaaatacggacattaacattaaaagacaccagtgaaattgttaggtctctaggaagttggagcacaaggcttcacgctttaagaccatctgtggttttcagtgaacaagcgctgagcaccagcagcagaaaacaacaacaaaaaaacacctcgtttttaccttgtcttctagacatgaaaaggcagttgcattccactctgcattatgttctacatgttgctttatcagtatatgcttagctgtaagtgacaagtattttttctgaacagaagtttacttagaaataccatgcacttgggggtaccaattaaccgcctgaaaattagcatattgatagttcttagagagaccagatataatctaagaatttatatgaaagatttgtatcattagagccagaaataattttatattaatatataatacagattaacattatatataatatgtacctgtgtcacttctgacatgagcctgtaaacatatattcatatatgtacctgcacatgtacccacctgatgtaggtcttattcctttagtatggacttaaagtacttattcatataccttgtaactaaaaattagaacagctccctagaattgtgaacttttaagagtctgactagaaatttgcaacttataaaaaagttacttttaaaaatataagttagggctaggcacagtggctcatgcctataatctcagcacttttgggaggccaagacaggaggatcacttcaggccaggagttcaagatcaaccaacctgggtaacatggccagaccccatctctatttatatatatatatataaaacttagagtttttatcttcccctaaaagaggccgtgatatttgcagcagcctcaaattgctcttaaggggtttaggtgtgcagaagctttcctttccctacccagtaaccatgtgactactaacgtggtatattgatttattttgtttgctgtctgtctcccctgccccactgctggaacagaggctccaagaaaacagggaccttattattcattactgcatccccagtaatgaaagtacttagaaaataattattgaatgaatgaaatctaaactgtgaacctgagggtgtttgtggcagtgtttgttttactgaattgtagaaggacataaccgtgttttcagtgtttctatggaacaaacttgtacattttatttcacttgtgttttgtcttaaaccctactgctggaaacaattttatgtaataagcaatgggcccaaaagtctaggagtttttttgtacttagtgaatttgtatgcaacagagatgctgcagctgatgcctttaaaaggtattcatcatggaagagctgaggcctgtgcttggtgttccagagcccagggttgagcatcctgaaggagccactgcagccgtcactgtccccagagcctgtggagatagagcctgtttgctgctttttcttcccgctcttaagacatggctggagctcagtcttcattgaatgaagtttgctgtggtattgcatagccttgctttcttgaactaaactgtttgcccttcacaagtagttcttctttcaggattagttcgttccaaggaggctcttcagtctcacagataagtagatctctcctgctgtctggacacatttcactcggaaattgaatacaatttgtattcaggctgggaacctgaacacacacttgtgtttttaagcttcccttttttacagtggacaaggacacaaataataaataaatcatccctaatgcccaagaaatgccctggtacttagtaataacaaaataccagtaacttc

SEQ ID NO: 54 - DNA, 4284 bp, Homo sapiens
  source 1..4284: mol_type = genomic DNA
gcacccgcactaaagacgcttcttcccggcgggtaggaatcccgccggcgagccgaacagttccccgagcgcagcccgcggaccaccacccggccgcacgggccgcttttgtcccccgcccgccgcttctgtccgagaggccgcccgcgaggcgcatcctgaccgcgagcgtcgggtcccagagccgggcgcggctggggcccgaggctagcatctctcgggagccgcaaggcgagagctgcaaagtttaattagacacttcagaattttgatcacctaatgttgatttcagatgtaaaagtcaagagaagactctaaaaatagcaaagatgcttttgagccagaatgccttcatcttcagatcacttaatttggttctcatggtgtatatcagcctcgtgtttggtatttcatatgattcgcctgattacacagatgaatcttgcactttcaagatatcattgcgaaatttccggtccatcttatcatgggaattaaaaaaccactccattgtaccaactcactatacattgctgtatacaatcatgagtaaaccagaagatttgaaggtggttaagaactgtgcaaataccacaagatcattttgtgacctcacagatgagtggagaagcacacacgaggcctatgtcaccgtcctagaaggattcagcgggaacacaacgttgttcagttgctcacacaatttctggctggccatagacatgtcttttgaaccaccagagtttgagattgttggttttaccaaccacattaatgtgatggtgaaatttccatctattgttgaggaagaattacagtttgatttatctctcgtcattgaagaacagtcagagggaattgttaagaagcataaacccgaaataaaaggaaacatgagtggaaatttcacctatatcattgacaagttaattccaaacacgaactactgtgtatctgtttatttagagcacagtgatgagcaagcagtaataaagtctcccttaaaatgcaccctccttccacctggccaggaatcagaatcagcagaatctgccaaaataggaggaataattactgtgtttttgatagcattggtcttgacaagcaccatagtgacactgaaatggattggttatatatgcttaagaaatagcctccccaaagtcttgaggcaaggtctcgctaagggctggaatgcagtggctattcacaggtgcagtcataatgcactacagtctgaaactcctgagctcaaacagtcgtcctgcctaagcttccccagtagctgggattacaagcgtgcatccctgtgccccagtgattaagttttattatgtagaaaataaagagcaaacagtacagctgatacggactctctctctctttttttttttttttaagaattttcataactttttagcctggccatttcctaacctgccaccgttggaagccatggatatggtggaggtcatttacatcaacagaaagaagaaagtgtgggattataattatgatgatgaaagtgatagcgatactgaggcagcgcccaggacaagtggcggtggctataccatgcatggactgactgtcaggcctctgggtcaggcctctgccacctctacagaatcccagttgatagacccggagtccgaggaggagcctgacctgcctgaggttgatgtggagctccccacgatgccaaaggacagccctcagcagttggaactcttgagtgggccctgtgagaggagaaagagtccactccaggacccttttcccgaagaggactacagctccacggaggggtctgggggcagaattaccttcaatgtggacttaaactctgtgtttttgagagttcttgatgacgaggacagtgacgacttagaagcccctctgatgctatcgtctcatctggaagagatggttgacccagaggatcctgataatgtgcaatcaaaccatttgctggccagcggggaagggacacagccaacctttcccagcccctcttcagagggcctgtggtccgaagatgctccatctgatcaaagtgacacttctgagtcagatgttgaccttggggatggttatataatgagatgactccaaaactattgaatgaacttggacagacaagcacctacagggttctttgtctctgcatcctaacttgctgccttatcgtctgcaagtgttctccaagggaaggaggaggaaactgtggtgttcctttcttccaggtgacatcacctatgcacattcccagtatggggaccatagtatcattcagtgcattgtttacatattcaaagtggtgcactttgaaggaagcacatgtgcacctttcctttacactaatgcacttaggatgtttctgcatcatgtctaccagggagcagggttccccacagtttcagaggtggtccaggaccctatgatatttctcttctttcgttcttttttttttttttttttgagacagagtctcgttctgtcgcccaagctggagcgcaatggtgtgatcttggctcactgcaacatccgcctcccaggttcaagtgattctcctgcctcagcctccctcgcaagtagctgggattacaggcgcctgccaccatgcctagcaaatttttgtatttttagtagagacaggattttaccatgttggccaggctggtctcaaactcctgacctcaagtgatctgccctcctcagcctcgtaaagtgctgggattacaggggtgagccgctgtgcctggctggccctgtgatatttctgtgaaataaattgggccagggtgggagcagggaaagaaaaggaaaatagtagcaagagctgcaaagcaggcaggaagggaggaggagagccaggtgagcagtggagagaaggggggccctgcacaaggaaacagggaagagccatcgaagtttcagtcggtgagccttgggcacctcacccatgtcacatcctgtctcctgcaattggaattccaccttgtccagccctccccagttaaagtggggaagacagactttaggatcacgtgtgtgactaatacagaaaggaaacatggcgtcggggagagggataaaacctgaatgccatattttaagttaaaaaaaaaaaaagcaaacacaaagatgcttcaagatcttcaggagaagtatggtatacaagtttcagggaccctatttgacaattttcagagtgctctctatgctgattccgagtcgagtgtgtcagctgtgattacagtgcctgtggatctaggccgggttgggggggtgtgggcgggggaagggaagtctggcccggagcaattgctcctgccggtaaccccagcactttgggatgcctaaacaggcgtatcgcttgaggccagtaattcgagaccagcctgggcaacatggcaaatctgtctctacaaaacaaaattagaaaaattaactgggcgtagtggcatgtgcctgttgtcccagctacttgggaggctgaggtgggagaatggcttgagcccaggaagcggaggttgcagtgagccaagatcatgtcactgcacttcagcctgggtgacagaaccagaccctgtctttaaaaagggagttggtggggagaggttctagaatgtcatgtagcaaccagtttaaggactgggactcagggatccaactcccacagtttccctgtgtgaccctaggcatttgacttagcctttctgagcctcaggttttttgtttctgaagtaaaaggattggactaggtaatctccaagatcctaggaacccaggagaaagatgagaaaatgtacaagaatgaacactcaggtggaaatgctgcaatcctgagaagctcccaggatgaatgaaaggcacaggacctcttacccctcacccctgcccccctcaagagctggtttctcaaacctttctcttaggccccttcaaagggggaaaactaaaaattatacaagttatagttcaaggactttaaatagattatttatatgattgctcataaggatgaggctgtgaggagggaacaccttatttaatctaatgaaattccataggaaagaggccttttgtatattgaatcaatttatctgccttctcagtgcatctgtcatattctgaaagattctgggttgatcttttgcgataacctctatggctgtgagtgtgtgtgtgtgtttgtgtattttttaacattttgtataatgattggaggttggtaaaaagtaacacaacagtacttttttaatacaaacttggtgtggt

SEQ ID NO: 55 - DNA, 1218 bp, Homo sapiens
  source 1..1218: mol_type = genomic DNA
gtgcagcacattgttctgatcatctgaagatcagctattagaagagaaagatcagttaagtcctttggacctgatcagcttgatacaagaactactgatttcaacttctttggcttaattctctcggaaacgatgaaatatacaagttatatcttggcttttcagctctgcatcgttttgggttctcttggctgttactgccaggacccatatgtaaaagaagcagaaaaccttaagaaatattttaatgcaggtcattcagatgtagcggataatggaactcttttcttaggcattttgaagaattggaaagaggagagtgacagaaaaataatgcagagccaaattgtctccttttacttcaaactttttaaaaactttaaagatgaccagagcatccaaaagagtgtggagaccatcaaggaagacatgaatgtcaagtttttcaatagcaacaaaaagaaacgagatgacttcgaaaagctgactaattattcggtaactgacttgaatgtccaacgcaaagcaatacatgaactcatccaagtgatggctgaactgtcgccagcagctaaaacagggaagcgaaaaaggagtcagatgctgtttcgaggtcgaagagcatcccagtaatggttgtcctgcctgcaatatttgaattttaaatctaaatctatttattaatatttaacattatttatatggggaatatatttttagactcatcaatcaaataagtatttataatagcaacttttgtgtaatgaaaatgaatatctattaatatatgtattatttataattcctatatcctgtgactgtctcacttaatcctttgttttctgactaattaggcaaggctatgtgattacaaggctttatctcaggggccaactaggcagccaacctaagcaagatcccatgggttgtgtgtttatttcacttgatgatacaatgaacacttataagtgaagtgatactatccagttactgccggtttgaaaatatgcctgcaatctgagccagtgctttaatggcatgtcagacagaacttgaatgtgtcaggtgaccctgatgaaaacatagcatctcaggagatttcatgcctggtgcttccaaatattgttgacaactgtgactgtacccaaatggaaagtaactcatttgttaaaattatcaatatctaatatatatgaataaagtgtaagttcacaacta

SEQ ID NO: 56 - DNA, 2139 bp, Homo sapiens
  source 1..2139: mol_type = genomic DNA
gcctcctgccgacgccggcacagaccccggtgacggaagtgacgtaaggccggggctggagggcagtgctgggctggtcccgcaggcgctcggggttggagccagcgaccgtcggtagcagcatggctctcctctttctcctaccccttgtcatgcagggtgtgagcagggctgagatgggcaccgcggatctggggccgtcctcagtgcctacaccaactaatgttacaattgaatcctataacatgaaccctatcgtatattgggagtaccagatcatgccacaggtccctgtttttaccgtagaggtaaagaactatggtgttaagaattcagaatggattgatgcctgcatcaatatttctcatcattattgtaatatttctgatcatgttggtgatccatcaaattctctttgggtcagagttaaagccagggttggacaaaaagaatctgcctatgcaaagtcagaagaatttgctgtatgccgagatggaaaaattggaccacctaaactggatatcagaaaggaggagaagcaaatcatgattgacatatttcacccttcagtttttgtaaatggagacgagcaggaagtcgattatgatcccgaaactacctgttacattagggtgtacaatgtgtatgtgagaatgaacggaagtgagatccagtataaaatactcacgcagaaggaagatgattgtgacgagattcagtgccagttagcgattccagtatcctcactgaattctcagtactgtgtttcagcagaaggagtcttacatgtgtggggtgttacaactgaaaagtcaaaagaagtttgtattaccattttcaatagcagtataaaaggttctctttggattccagttgttgctgctttactactctttctagtgcttagcctggtattcatctgtttttatattaagaaaattaatccattgaaggaaaaaagcataatattacccaagtccttgatctctgtggtaagaagtgctactttagagacaaaacctgaatcaaaatatgtatcactcatcacgtcataccagccattttccttagaaaaggaggtggtctgtgaagagccgttgtctccagcaacagttccaggcatgcataccgaagacaatccaggaaaagtggaacatacagaagaactttctagtataacagaagtggtgactactgaagaaaatattcctgacgtggtcccgggcagccatctgactccaatagagagagagagttcttcacctttaagtagtaaccagtctgaacctggcagcatcgctttaaactcgtatcactccagaaattgttctgagagtgatcactccagaaatggttttgatactgattccagctgtctggaatcacatagctccttatctgactcagaatttcccccaaataataaaggtgaaataaaaacagaaggacaagagctcataaccgtaataaaagcccccacctcctttggttatgataaaccacatgtgctagtggatctacttgtggatgatagcggtaaagagtccttgattggttatagaccaacagaagattccaaagaattttcatgagatcagctaagttgcaccaactttgaagtctgattttcctggacagttttctgctttaatttcatgaaaagattatgatctcagaaattgtatcttagttggtatcaaccaaatggagtgacttagtgtacatgaaagcgtaaagaggatgtgtggcattttcacttttggcttgtaaagtacagacttttttttttttttaaacaaaaaaagcattgtaacttatgaacctttacatccagataggttaccagtaacggaacagtatccagtactcctggttcctaggtgagcaggtgatgccccagggacctttgtagccacttcactttttttcttttctctgccttggtatagcatatgtttttgtaagtttatgcatacagtaattttaagtaatttcagaagaaattctgcaagcttttcaaaattggacttaaaatctaattcaaactaatagaattaatggaatatgtaaatagaaacgtgtatattttttatgaaacattacagttagagatttttaaataaagaattttaaaactcg

SEQ ID NO: 57 - DNA, 2221 bp, Homo sapiens
  source 1..2221: mol_type = genomic DNA
gttgactggaggcggaggttgcagtgagccgagatcgccccactgcactccagcctggtgactccgtctcaaaaaaaaggggaggggggcgggggagagttgaaagcttaatatgtactttgggggctattaaagcaaacatttcgactaaaggggcgaatcctcgaattgtgcgatcaagcacccgagaggagagttggggggggtcaggaggggtgggggctccagggaaagcccgggggtctgggccggggtctcgcggggcccttccggaaggatcgcggcccccgaaggtgggcgtcccgcggggctccagtctccaggacgttccgggaggctccgcgctctgggaggccggctgcgtggggtccccgcgctgcagccgcagaggccccccagggccgcggttcccggagcgggaaagtcccgcgcgggggcggtggcctcgggggcgggacggggcgggggcgggggcgcgggcggccgagccgaatcccctccaccgggacgccccgctgctgctcgggaagaggcgggccctgcgcgccctgcgctcgccatggcggtttgggcggcgacgtgagcggctccgcggaccccgagcggggccccggccgcgacctgagccgccgccgagcgcccggggccatgcgaccgacgctgctgtggtcgctgctgctgctgctcggagtcttcgccgccgccgccgcggccccgccagaccctctttcccagctgcccgctcctcagcacccgaagattcgcctgtacaacgcagagcaggtcctgagttgggagccagtggccctgagcaatagcacgaggcctgttgtctaccaagtgcagtttaaatacaccgacagtaaatggttcacggccgacatcatgtccataggggtgaattgtacacagatcacagcaacagagtgtgacttcactgccgccagtccctcagcaggcttcccaatggatttcaatgtcactctacgccttcgagctgagctgggagcactccattctgcctgggtgacaatgccttggtttcaacactatcggaatgtgactgtcgggcctccagaaaacattgaggtgaccccaggagaaggctccctcatcatcaggttctcctctccctttgacatcgctgatacctccacggcctttttttgttattatgtccattactgggaaaaaggaggaatccaacaggtcaaaggccctttcagaagcaactccatttcattggataacttaaaaccctccagagtgtactgtttacaagtccaggcacaactgctttggaacaaaagtaacatctttagagtcgggcatttaagcaacatatcttgctacgaaacaatggcagatgcctccactgagcttcagcaagtcatcctgatctccgtgggaacattttcgttgctgtcggtgctggcaggagcctgtttcttcctggtcctgaaatatagaggcctgattaaatactggtttcacactccaccaagcatcccattacagatagaagagtatttaaaagacccaactcagcccatcttagaggccttggacaaggacagctcaccaaaggatgacgtctgggactctgtgtccattatctcgtttccggaaaaggagcaagaagatgttctccaaacgctttgaaccaaagcatgggcctagcccactggctccctggaagagatcaagccatcggagctgctagagttctgtctggactttccagagaccagtattcccttttgctgcctctaaaaggcctgtccctgcagacatgagagacagcaggtctcatgggggtgacaagctttttttttttttcttaaagaattttcaaaatcaaattccagaatgattttacggagatatcccaggaaaattaaggcttctcttaaacactaaaaaggcatgtaattgcttgttagcaaaatggatatgacacatctctgatacttttttcattattggttgggctgagcagtcagaagacctggtcgtcgtcttgactttggcaaatgagccggagccccttgggcaggtcacacaacctgtcccagcgagggacaccgagtggcccttcatgtacatccatggtgtgctggcttaaaatgtaattaatcttgtaaatatactcctagtaatttaagattttgtttttaaactggaaataaaagattgtatagtgcatgttttttaaagtcta

SEQ ID NO: 58 - DNA, 6302 bp, Homo sapiens
  source 1..6302: mol_type = genomic DNA
attgtgaaagaaagctgggaagagctccgcggccaagttagcaggacactctaacaagtgactgcgcggcccgcgcccggggcggtgactgcggcaagccccctgggtccccgcgcggcgcatcccagcctgggcgggacgctcggccgcggcgaggcgggcaagcctggcagggcagagggagccccggctccgaggttgctcttcgcacccgaggatcagtcttggccccaaagcgcgacgcacaaatccacataacctgaggaccatggatgctgatgagggtcaagacatgtcccaagtttcagggaaggaaagcccccctgtaagcgatactccagatgagggcgatgagcccatgccgatccccgaggacctctccaccacctcgggaggacagcaaagctccaagagtgacagagtcgtggccagtaatgttaaagtagagactcagagtgatgaagagaatgggcgtgcctgtgaaatgaatggggaagaatgtgcggaggatttacgaatgcttgatgcctcgggagagaaaatgaatggctcccacagggaccaaggcagctcggctttgtcgggagttggaggcattcgacttcctaacggaaaactaaagtgtgatatctgtgggatcatttgcatcgggcccaatgtgctcatggttcacaaaagaagccacactggagaacggcccttccagtgcaatcagtgcggggcctcattcacccagaagggcaacctgctccggcacatcaagctgcattccggggagaagcccttcaaatgccacctctgcaactacgcctgccgccggagggacgccctcactggccacctgaggacgcactccgttggtaaacctcacaaatgtggatattgtggccgaagctataaacagcgaagctctttagaggaacataaagagcgctgccacaactacttggaaagcatgggccttccgggcacactgtacccagtcattaaagaagaaactaatcacagtgaaatggcagaagacctgtgcaagataggatcagagagatctctcgtgctggacagactagcaagtaacgtcgccaaacgtaagagctctatgcctcagaaatttcttggggacaagggcctgtccgacacgccctacgacagcagcgccagctacgagaaggagaacgaaatgatgaagtcccacgtgatggaccaagccatcaacaacgccatcaactacctgggggccgagtccctgcgcccgctggtgcagacgcccccgggcggttccgaggtggtcccggtcatcagcccgatgtaccagctgcacaagccgctcgcggagggcaccccgcgctccaaccactcggcccaggacagcgccgtggagaacctgctgctgctctccaaggccaagttggtgccctcggagcgcgaggcgtccccgagcaacagctgccaagactccacggacaccgagagcaacaacgaggagcagcgcagcggtctcatctacctgaccaaccacatcgccccgcacgcgcgcaacgggctgtcgctcaaggaggagcaccgcgcctacgacctgctgcgcgccgcctccgagaactcgcaggacgcgctccgcgtggtcagcaccagcggggagcagatgaaggtgtacaagtgcgaacactgccgggtgctcttcctggatcacgtcatgtacaccatccacatgggctgccacggcttccgtgatccttttgagtgcaacatgtgcggctaccacagccaggaccggtacgagttctcgtcgcacataacgcgaggggagcaccgcttccacatgagctaaagccctcccgcgcccccaccccagaccccgagccaccccaggaaaagcacaaggactgccgccttctcgctcccgccagcagcatagactggactggaccagacaatgttgtgtttggatttgtaactgttttttgttttttgtttgagttggttgattggggtttgatttgcttttgaaaagatttttatttttagaggcagggctgcattgggagcatccagaactgctaccttcctagatgtttccccagaccgctggctgagattccctcacctgtcgcttcctagaatccccttctccaaacgattagtctaaattttcagagagaaatagataaaacacgccacagcctgggaaggagcgtgctctaccctgtgctaagcacggggttcgcgcaccaggtgtctttttccagtccccagaagcagagagcacagcccctgctgtgtgggtctgcaggtgagcagacaggacaggtgtgccgccacccaagtgccaagacacagcagggccaacaacctgtgcccaggccagcttcgagctacatgcatctagggcggagaggctgcacttgtgagagaaaatactatttcaagtcatattctgcgtaggaaaatgaattggttggggaaagtcgtgtctgtcagactgccctgggtggagggagacgccgggctagagcctttgggatcgtcctggattcactggctttgcggaggctgctcagatggcctgagcctcccgaggcttgctgccccgtaggaggagactgtcttcccgtgggcatatctggggagccctgttccccgctttttcactcccatacctttaatggcccccaaaatctgtcactacaatttaaacaccagtcccgaaatttggatcttctttctttttgaatctctcaaacggcaacattcctcagaaaccaaagctttatttcaaatctcttccttccctggctggttccatctagtaccagaggcctcttttcctgaagaaatccaatcctagccctcattttaattatgtacatctgtttgtagccacaagcctgaatttctcagtgttggtaagtttctttacctaccctcactatatattattctcgttttaaaacccataaaggagtgatttagaacagtcattaattttcaactcaatgaaatatgtgaagcccagcatctctgttgctaacacacagagctcacctgtttgaaaccaagctttcaaacatgttgaagctctttactgtaaaggcaagccagcatgtgtgtccacacatacataggatggctggctctgcacctgtaggatattggaatgcacagggcaattgagggactgagccagaccttcggagagtaatgccaccagatcccctaggaaagaggaggcaaatggcactgcaggtgagaaccccgcccatccgtgctatgacatggaggcactgaagcccgaggaaggtgtgtggagattctaatcccaacaagcaagggtctccttcaagattaatgctatcaatcattaaggtcattactctcaaccacctaggcaatgaagaatataccatttcaaatatttacagtacttgtcttcaccaacactgtcccaaggtgaaatgaagcaacagagaggaaattgtacataagtacctcagcatttaatccaaacaggggttcttagtctcagcactatgacattttgggctgactacttatttgttaggcgggagctctcctgtgcattgtaggataattagcagtatccctggtggctacccaatagacgccagtagcaccccgaattgacaacccaaactctccagacatcaccaactgtcccctgcgaggagaaatcactcctgggggagaaccactgacccaaatgaattctaaaccaatcaaatgtctgggaagccctccaagaaaaaaaatagaaaagcacttgaagaatattcccaatattcccggtcagcagtatcaaggctgacttgtgttcatgtggagtcattataaattctataaatcaattattccccttcggtcttaaaaatatatttcctcataaacatttgagttttgttgaaaagatggagtttacaaagataccattcttgagtcatggatttctctgctcacagaagggtgtggcatttggaaacgggaataaacaaaattgctgcaccaatgcactgagtgaaggaagagagacagaggatcaagggctttagacagcactccttcaatatgcaatcacagagaaagatgcgccttatccaagttaatatctctaaggtgagagccttcttagagtcagtttgttgcaaatttcacctactctgttcttttccatccatccccctgagtcagttggttgaagggagttattttttcaagtggaattcaaacaaagctcaaaccagaactgtaaatagtgattgcaggaattcttttctaaactgctttgccctttcctctcactgccttttatagccaatataaatgtctctttgcacaccttttgttgtggttttatattgtaacaccatttttctttgaaactattgtatttaaagtaaggtttcatattatgtcagcaagtaattaacttatgtttaaaaggtggccatatcatgtaccaaaagttgctgaagtttctcttctagctggtaaagtaggagtttgcatgacttcacactttttttgcgtagtttcttctgttgtatgatggcgtgagtgtgtgtcttgggtaccgctgtgtactactgtgtgcctagattccatgcactctcgttgtgtttgaagtaaatattggagaccggagggtaacaggttggcctgttgattacagctagtaatcgctgtgtcttgttccgccccctccctgacaccccagcttcccaggatgtggaaagcctggatctcagctccttgccccatatcccttctgtaatttgtacctaaagagtgtgattatcctaattcaagagtcactaaaactcatcacattatcattgcatatcagcaaagggtaaagtcctagcaccaattgcttcacataccagcatgttccatttccaatttagaattagccacataataaaatcttagaatcttccttgagaaagagctgcctgagatgtagttttgttatatggttccccaccgaccatttttgtgcttttttcttgttttgttttgttttgactgcactgtgagttttgtagtgtcctcttcttgccaaaacaaacgcgagatgaactggacttatgtagacaaatcgtgatgccagtgtatccttcctttcttcagttccagcaataatgaatggtcaacttttttaaaatctagatctctctcattcatttcaatgtatttttactttaagatgaaccaaaattattagacttatttaagatgtacaggcatcagaaaaaagaagcacataatgcttttggtgcgatggcactcactgtgaacatgtgtaaccacatattaatatgcaatattgtttccaatactttctaatacagttttttataatgttgtgtgtggtgattgttcaggtcgaatctgttgtatccagtacagctttaggtcttcagctgcccttctggcgagtacatgcacaggattgtaaatgagaaatgcagtcatatttccagtctgcctctatgatgatgttaaattattgctgtttagctgtgaacaagggatgtaccactggaggaatagagtatccttttgtacacattttgaaatgcttcttctgtagtgatagaacaaataaatgcaacgaatactctgtctgccctatcccgtgaagtccacactggcgtaagagaaggcccagcagagcaggaatctgcctagactttctcccaatgagatcccaatatgagagggagaagagatgggcctcaggacagctgcaataccacttgggaacacatgtggtgtcttgatgtggccagcgcagcagttcagcacaacgtacctcccatctacaacagtgctggacgtgggaattctaagtcccagtcttgagggtgggtggagatggagggcaacaagagatacatttccagttctccactgcagcatgcttcagtcattctgtgagtggccgggcccagggccctcacaatttcactaccttgtcttttacatagtcataagaattatcctcaacatagccttttgacgctgtaaatcttgagtattcatttacccttttctgatctcctggaaacagctgcctgcctgcattgcacttctcttcccgaggagtggggtaaatttaaaagtcaagttatagtttggatgttagtatagaattttgaaattgggaattaaaaatcaggactggggactgggagaccaaaaatttctgatcccatttctgatggatgtgtcacaccttttctgtcaaaataaaatgtcttggaggttatgactccttggtgaaa

SEQ ID NO: 59 - DNA, 9344 bp, Homo sapiens
  source 1..9344: mol_type = genomic DNA
aaccctgctcctcgctgaagatggaggaagtaaaaacaggattacccttagctacagatccactgccttagtttccaccaccaactgcagtgcacaaacacacgttaggcacaggaaagaaagaaagacagaggacacattaacagtaaacacaaacaaaagggtgatgggattattttactgcatgcactgctgagcccgacattgtcacctcctctttgaggggttagaagaagctgagatctcccgacagagctggaaatggtgatgaatcttttttaatcaaaggacaatttcttttcattgcactttgactatggaaacagaggctattgatggctatataacgtgtgacaatgagctttcacccgaaagggagcactccaatatggcaattgacctcacctcaagcacacccaatggacagcatgcctcaccaagtcacatgacaagcacaaattcagtaaagctagaaatgcagagtgatgaagagtgtgacaggaaacccctgagccgtgaagatgagatcaggggccatgatgagggtagcagcctagaagaacccctaattgagagcagcgaggtggctgacaacaggaaagtccaggagcttcaaggcgagggaggaatccggcttccgaatggtgaacgccccttccactgtaaccagtgtggagcttcttttactcagaagggcaaccttctgagacacataaagttacactctggagagaagccgttcaaatgtcctttctgtagctacgcctgtagaagaagggacgccctcacaggacacctcaggacccattctgtgggtaaacctcacaagtgcaactactgtggacgaagctacaagcagcgcagttcactggaggagcacaaggaacgctgccacaactatctccagaatgtcagcatggaggctgctgggcaggtcatgagtcaccatggggaaaagctcatgcgattcagctacccagatattcactttgatatgaacttaacatatgagaaggaggctgagctgatgcagtctcatatgatggaccaagccatcaacaatgcaatcacctaccttggagctgaggcccttcaccctctgatgcagcacccgccaagcacaatcgctgaagtggccccagttataagctcagcttattctcaggtctatcatccaaataggatagaaagacccattagcagggaaactgctgatagtcatgaaaacaacatggatggccccatctctctcatcagaccaaagagtcgaccccaggaaagagaggcctctcccagcaatagctgcctggattccactgactcagaaagcagccatgatgaccaccagtcctaccaaggacaccctgccttaaatcccaagaggaaacaaagcccagcttacatgaaggaggatgtcaaagctttggatactaccaaggctcctaagggctctctgaaggacatctacaaggtcttcaatggagaaggagaacagattagggccttcaagtgtgagcactgccgagtccttttcctagaccatgtcatgtacaccattcacatgggttgccatggctaccgggacccactggaatgcaacatctgtggctacagaagccaggaccgttatgagttttcatcacacattgttcgaggggagcacacattccactaggccttttcattccaaaggggacccctatgaagtaaagaactgcacatgaagaaatactgcacttacaatcccacctttcctcaaatgttgacataccttttattttttttaatattattactgttgataattcttattttgtggaggcagtgtcatttgctctgcctaattacgataaggaagaaacagaagagagaaggggcgggaatattgtttctttatcacctggcttgtttattttgtgggaatttaagagcagtccatttctaccaaggcatatcatgctttgaaaaatcacttgattcataaagattcacctaagagattctgatttgccactgatattcagaattatgatggaagacaggaaagttcagagttttctgggtaggactttggtggtttaaaaatggtataagtaactttattcttgaaagaagaatgtgtttcaaactgtaaaccaattttttgttcttcagagatcatggaacacaaacacattgttattttcagtgataactcctaagaggagctgagttgttgtgggttctatgtttacttcccctatggaatttataattcagtatgttttacactgtaccatatagcaaaacttttaaactacaggtagttaagggccacctacaatacatctgaggtcctgtgatcttatttttctaaacgtaagcactgtttttccatagttttgatgactggcattttatagacaccctggcagccttacttttaacacctttaaggaatagtatttttatgtagttttcagaataacatatggtctaagagtggataaaaggcagtcaataatttctgggagggacttctactttcataaatttgtttgagaggttttcttttaaagttgtaatgtgatggcagcatagtatatgtatttgtttctaaaagtatgcttacgattgtcactttatcagcatttaatcagtgttaaccagtcagcagaaaaatataattatgctaacagtagggggagaaaacccacttagaaatcccttttctggtatttctcttttcactagtttttttcaagatgtgacctcccggtgttctgtccatagttcattcatcctttactcttcgagtagaaggtcttaaaagtcttcctgtcggctgtttctttcaaaatctcctcagagcaattgctaatttggcctgaatctggtaacttgaaccctgtaaggttacagaactagggctatttattttagcatttcttcagtagtatttactactcttgttgcaaagaaaagggaatgggacttctttgtaacctgtaccttggacaacagataaaagaaacaaaaaaataagaaagtttacttttacccttcttggagtctagaatgtgacagaacccccaaaggaaagtcctgcacatttttctgtttccaaaacatttaattgtgtaagtccttgtcagaaatgaatctcaatcccttagtatagaattccccttacatggtataggttgccatatttcatgtgcagattttaatttcatttatgtgggcgctctgttttttctttgcagtccagccacattagaggggaggaaccgagtgatattgattcaagtcattttagggggacatacttggaaggcagaacttgctgcttctgtttggggaggacagacctgactgtgactggattatctgataaccatttgtgaatactgaaattctgttaggcagtaactgataactgctctaaaggatcattaaataggatgctgaaattatgtatcttaatacagtgtggtatgagaattaccaagtcaagagaattgtggacataagcaagtttggccccaatactgctcttaactcattttccagcttactatttgctatttaaatggtaggcaccagctaagcacttctaagcactaacacagctagaactaggcaaaaatggttagaactcagctctcttctactagtccctgtcataattatttttgggaaaatgtccaaactgccccctttaaatctaagggaatgcaccaaaacagagatatatagaatgtcaaccatttcatttttttttttctgcatgccttggtacatagtgaacatacaacctatttaaagataaagcatgtttttgagactcgctcacccccccccacccaaccactcccaaataataattgggatgccattttttttccttttggatgaggtaaataattttaaggttcacaattttgtcttttactgcaatttaaggaaacatttggatgtcagtcaatatgttcataattttggctgtgtgcgaatttctgctggcattatctatgaattttcttcctacttatttttttttcagtatatgaacaatcatgtatctacctgccccaggatgaaactaaatttaggtggaccctaaaccttatgaagacagtgctgaggcactttccttttctgatttcatctttttgggaatctgttttattgaaggtagttagtagttgagagtgcatttgctacaagcatatacttgtatcttcctagcttcatgaggaacagaaagaggtggatatggctcagggtgtggcagggacaattgaggacaaagtcaattcaaatttgtgggtcagaaagaatttttgtggacgtagtgtttttggagaaactctggatggttatatgtgcatgccttttcttcaaaaggaaatacgcaaggttgtagcatctaaaaataaacataagagtcagacaccaaataaatcaagttttacataacagttgtatgcccagtttgtttaggtgagatttcacattacagaaagtatttgaggagcatgaaaatgggttatcttctgtattttccagtttggcaaaagttcagaatttcatcacattgctttgccctaattttgcccagaattttatcttagcctctctctgacagtgatgaatcatgctcaaaagccattctaattggacctttttaagacagggaaagggatcagtaggcggattggaagaaatttcaagtcattgaaatattccattgagatttcctaaagggacaaaattgggaaaataagaaactacgacttagatttggctacgtagtagaaagtatctcccctacatacatacaggcaattgtatgtatgaatcatagggtatatgtgtgtgtatactacacacacattcttttaaagagaattcatggaaaaaaaagcagttggagtgatcagatgtattgcaaaaacatacagagaatttaaatgacagttaataccaagaaattagttgggtttactttatcaggtcgtaataggaatcactaaagaagttactagtgtgtctttaggaccagtggcaactcttaaactaaaactttgggtccttattatctacttacagaacaaagtgaaacaaacaatgattaagctgattggatatacattcaaagatatttaatgtaaagttttttggaatacgaagaaaattcagaaaataaatattatcaacagttacttattggcaaatagagaaagacaagaatagtttagtgagcccggtattttgtttttatagtttttatctcagttgtacaactcacaaaaccatgaagtctttggtattttataaatgtttaacaaaatttacatcagattaaggcatttagatgaaaattattatgttctcactatcttccaaattttatttcatcctatctccaaaatgatttcttagggtacaaaaagagcagacggggctgtaaaaatacaagcaaaaaactgtgtgcccctagtttcaggcagaacttaaactgtcagaggtactagctacatgatttgttttttaactttggattgttcacgtccaaaaatggataaattacatttgtgtttatcatcagttgcattttatgtattattttaataaatactatctgaatgaagactattctaaaccagaaaattccccaaatccaaaagaaaaaaaaagtgggaagaggtgaaattgaagtttgtgtatatgaaagttatcttagacatatttttaattctccagtttctgcaaaataattaaaatatacagtaactggtctcctaaatcctgaatttaatgtattaaatacttatgttctttatattggtgcctttttaaaatgcattgagagtgttggttagctgttgcagctgtacaacacttttaatatgcatttttaaaaatcacttaaaattgagtactatataattcatctctgcatttttagtgcaaatctttagagcaatttctaatagagaaattttcagctcagctgttaaaaggaaaaggaaactttgaaactagactttactacctttttagtttcatagtatttctgaatatgattacaagattatgcaggtaaaatatagagtgaaactttacctgtgaattgaattataatttgtgtttttgttttgtttttaaggaagaataagttctgtatcaaacaagaatttattagataattttttggtcaataaaatacagtattcatttggattttcatctccagactagtattgttctagtcttggaatctgtattttctaatctgttagaaaatagagattgaaaattgatggaataatgtgaaaaagcaggtaattaattctccttgaacaaagcaaaactgaacagtcatatcacattgctattctccaaagcataatctcaaatggtttcatatcatggttgtgtattacttgcaatgggtgtgttaggatatgacagctttttaaaaaaatgagctgctggttatacaaagcaaatggcatatgaccaagaagctgtgatatgctagtgtttctttttatcatagtgtattactaggccaaataatgacaccttgaatatttttacatttattgcagaaaccttaaactttggaatttccataaggtttttatgtaatattctatttctagctttttagttttatcttgctgtactgtaagtttgaggatatttttcacctgcactcttaggaataagttcataattctgtttatggggctttcctcccataacactgcatttgtatattttctgtataaaatatgtgttgtgtattaacctttatcccatacagagagtggtacatgaatgactagttttctaagatgtcctttttattgtgaataaaatataaaagttaaaggccctctgctaagtcacataaagtacagcatataagttcatataggtacaaataaatgagtttgcagtgaattgggccttcaaattacctcaagtgacagatagtaagaaaagcttcttgagcaggtggaggtcactgaatcccctactatgcacttaccaagattttacttactttaatttactggaaattgattttttaaaaaatgactacactgtaacaagggaagggatctgggtttttttgttgttttattcttgttttttttaagtagttcaaattctgaaactgtgatttaaaaattttttacagtcaagcattctgattttgaacataactcccttccctttctgtgtaacaaaggtctctctgttatctcttaaattttgttacatctccctcagcctctttctttgtccgtctcccttctgtcattgtctatggatgtttacctctctgttctcctaaaagtttgaagattaggtcaactcttatttctagttcattggtaatttaatcttaatttttttttcgtgatttttgttggttgtataatctgctgacgtatttttatactcaagtgtagttttctattaaaaagaaaagtggttggattaaaaatagtaagctatgtaaccctcatgttactttcactttcaaatattgggtacctaaaacattacttcagagattatgtaatcctattatagtatgtttgctttcctttattgttggattttacattctgatttggctttcctccaaaaaatgtatatcatgaaagactagacagttatttgcaagtgtttagaaaggtgttaaaaatgtaaagcaaagagtcttaactttctcctaattgggagaaaaatgctttaacattactataataatattccaggtttggagggggtctccaggccccatatttgctgttaatagttggaccttttagaccatgtgttatttgcaatcccagaatgattgcttctgctattagttaaaaagatactattcttttctttctgtacaagtgcaatactccccttgaagtcttaaaaactatggtgatttttttttcttttctgacctattcttcctttagctaatgacaaaaagaaactcataaaagtcatagtatgttaaaggacacaacaagcaaagagaaaaacactccacaatcaaaagattacagaatgtggaaaccactagtctgatctcatggtatctttatttaagctaaatttccatggaaattagtaatcttttgcttgaaaaatgtgtcctaaagttgaactttttacagattgaatcttcttagaccctcgcccaatgctctaaattaagaacctaatacttaatatttttattttacttctccccttttagaaataaacttttaaataaaagcaaagcacttagctgagttttaaacacttacatatcacctattggagaaattttttttaaaaatatttggagcagtcctgttttcatacaaatttaagtaagaggtatttttcttatacatatttatatgtagtgtgctaattttctttttttatacctgtgtccctgtagtaaaactgctgtaatataaatacatgttttgttaaaagataacatttctttggcatttcttttaaaggcagttactgcatttctgcatttgtacagtatgtgtcttggccattttagatattctttctttaacaataccaaaggtaattagactattttaaagactaattgcttgacagtttctagggtattttgtgttttagaagcaaaaaaagaaaaaaaaataggtcaaaccagtaaacctcattttttttcaaactaataatttggggaaataaaaactattgtttaaaaaagaaatatatatatatatatataaatatatatgtaaagttaaaattccataccttgtatgtcaggtttgctaagtgtaatgtagtttttttaaggctcaaataccatacctcagaaaatgaggtttactatggaaatactgaaacagtctttgcagctgtgtgacaagtcactctactacatactgatttggagacctccgctaaatagttttatcactgcagactaaaatgtgggacttgtatcttctttgtttttaatgcacacacatacatgttctgtgcatgtatgtggttactgtgtatatgtgtatgagtgttgtatatgcatgtgtgagtgtgtgtctgtatgtgtgtacaactaaagaagctgcagaaactttgtaatactttgtgaaaaggattatattataaaggtttgtactgtctgagtgcacagctactggaataaatttagggaatctcaggaacaagcatataatttgtccaagatttatttcttctcagaagtgtaagtgcagtttttaattctgtatattatttaatattttaccaataaaataaacttctgacataaaaagtttgct

SEQ ID NO: 60 - DNA, 3695 bp, Homo sapiens
  source 1..3695: mol_type = genomic DNA
gacgtcagccctgcggggcgctggcggagcgggcggcggagctgtcagtcccagcccaagggtagctggaggcgcgcaggccggctccgctccggccccggacgatgcggcgcgcccaggatgctgccgtgcctcgtagtgctgctggcggcgctcctcagcctccgtcttggctcagacgctcatgggacagagctgcccagccctccgtctgtgtggtttgaagcagaatttttccaccacatcctccactggacacccatcccaaatcagtctgaaagtacctgctatgaagtggcgctcctgaggtatggaatagagtcctggaactccatctccaactgtagccagaccctgtcctatgaccttaccgcagtgaccttggacctgtaccacagcaatggctaccgggccagagtgcgggctgtggacggcagccggcactccaactggaccgtcaccaacacccgcttctctgtggatgaagtgactctgacagttggcagtgtgaacctagagatccacaatggcttcatcctcgggaagattcagctacccaggcccaagatggcccccgcaaatgacacatatgaaagcatcttcagtcacttccgagagtatgagattgccattcgcaaggtgccgggaaacttcacgttcacacacaagaaagtaaaacatgaaaacttcagcctcctaacctctggagaagtgggagagttctgtgtccaggtgaaaccatctgtcgcttcccgaagtaacaaggggatgtggtctaaagaggagtgcatctccctcaccaggcagtatttcaccgtgaccaacgtcatcatcttctttgcctttgtcctgctgctctccggagccctcgcctactgcctggccctccagctgtatgtgcggcgccgaaagaagctacccagtgtcctgctcttcaagaagcccagccccttcatcttcatcagccagcgtccctccccagagacccaagacaccatccacccgcttgatgaggaggcctttttgaaggtgtccccagagctgaagaacttggacctgcacggcagcacagacagtggctttggcagcaccaagccatccctgcagactgaagagccccagttcctcctccctgaccctcacccccaggctgacagaacgctgggaaacagggagccccctgtgctgggggacagctgcagtagtggcagcagcaatagcacagacagcgggatctgcctgcaggagcccagcctgagccccagcacagggcccacctgggagcaacaggtggggagcaacagcaggggccaggatgacagtggcattgacttagttcaaaactctgagggccgggctggggacacacagggtggctcggccttgggccaccacagtcccccggagcctgaggtgcctggggaagaagacccagctgctgtggcattccagggttacctgaggcagaccagatgtgctgaagagaaggcaaccaagacaggctgcctggaggaagaatcgcccttgacagatggccttggccccaaattcgggagatgcctggttgatgaggcaggcttgcatccaccagccctggccaagggctatttgaaacaggatcctctagaaatgactctggcttcctcaggggccccaacgggacagtggaaccagcccactgaggaatggtcactcctggccttgagcagctgcagtgacctgggaatatctgactggagctttgcccatgaccttgcccctctaggctgtgtggcagccccaggtggtctcctgggcagctttaactcagacctggtcaccctgcccctcatctctagcctgcagtcaagtgagtgactcgggctgagaggctgcttttgattttagccatgcctgctcctctgcctggaccaggaggagggcccctggggcagaagttaggcacgaggcagtctgggcacttttctgcaagtccactggggctggccccagccaggccctgcagggctggtcagggtgtctggggcaggaggaggccaactcactgaactagtgcagggtatgtgggtggcactgacctgttctgttgactggggccctgcagactctggcagagctgagaagggcagggaccttctccctcctaggaactctttcctgtatcataaaggattatttgctcaggggaaccatggggctttctggagttgtggtgaggccaccaggctgaagtcagctcagacccagacctccctgcttaggccactcgagcatcagagcttccagcaggaggaagggctgtaggaatggaagcttcagggccttgctgctggggtcatttttaggggaaaaaggaggatatgatggtcacatggggaacctcccctcatcgggcctctggggcaggaagcttgtcactggaagatcttaaggtatatattttctggacactcaaacacatcataatggattcactgaggggagacaaagggagccgagaccctggatggggcttccagctcagaacccatccctctggtgggtacctctggcacccatctgcaaatatctccctctctccaacaaatggagtagcatccccctggggcacttgctgaggccaagccactcacatcctcactttgctgccccaccatcttgctgacaacttccagagaagccatggttttttgtattggtcataactcagccctttgggcggcctctgggcttgggcaccagctcatgccagccccagagggtcagggttggaggcctgtgcttgtgtttgctgctaatgtccagctacagacccagaggataagccactgggcactgggctggggtccctgccttgttggtgttcagctgtgtgattttggactagccacttgtcagagggcctcaatctcccatctgtgaaataaggactccacctttaggggaccctccatgtttgctgggtattagccaagctggtcctgggagaatgcagatactgtccgtggactaccaagctggcttgtttcttatgccagaggctaacagatccaatgggagtccatggtgtcatgccaagacagtatcagacacagccccagaagggggcattatgggccctgcctccccataggccatttggactctgccttcaaacaaaggcagttcagtccacaggcatggaagctgtgaggggacaggcctgtgcgtgccatccagagtcatctcagccctgcctttctctggagcattctgaaaacagatattctggcccagggaatccagccatgacccccacccctctgccaaagtactcttaggtgccagtctggtaactgaactccctctggaggcaggcttgagggaggattcctcagggttcccttgaaagctttatttatttattttgttcatttatttattggagaggcagcattgcacagtgaaagaattctggatatctcaggagccccgaaattctagctctgactttgctgtttccagtggtatgaccttggagaagtcacttatcctcttggagcctcagtttcctcatctgcagaataatgactgacttgtctaattcgtagggatgtgaggttctgctgaggaaatgggtatgaatgtgccttgaacacaaagctctgtcaataagtgatacatgttttttattccaataaattgtcaagaccaca

SEQ ID NO: 61 - DNA, 1963 bp, Homo sapiens
  source 1..1963: mol_type = genomic DNA
gccccgcccatctccgctggttcccggaagccgccgcggacaagctctcccgggcgcgggcgggggtcgtgtgcttggaggaagccgcggaacccccagcgtccgtccatggcgtggagccttgggagctggctgggtggctgcctgctggtgtcagcattgggaatggtaccacctcccgaaaatgtcagaatgaattctgttaatttcaagaacattctacagtgggagtcacctgcttttgccaaagggaacctgactttcacagctcagtacctaagttataggatattccaagataaatgcatgaatactaccttgacggaatgtgatttctcaagtctttccaagtatggtgaccacaccttgagagtcagggctgaatttgcagatgagcattcagactgggtaaacatcaccttctgtcctgtggatgacaccattattggaccccctggaatgcaagtagaagtacttgctgattctttacatatgcgtttcttagcccctaaaattgagaatgaatacgaaacttggactatgaagaatgtgtataactcatggacttataatgtgcaatactggaaaaacggtactgatgaaaagtttcaaattactccccagtatgactttgaggtcctcagaaacctggagccatggacaacttattgtgttcaagttcgagggtttcttcctgatcggaacaaagctggggaatggagtgagcctgtctgtgagcaaacaacccatgacgaaacggtcccctcctggatggtggccgtcatcctcatggcctcggtcttcatggtctgcctggcactcctcggctgcttcgccttgctgtggtgcgtttacaagaagacaaagtacgccttctcccctaggaattctcttccacagcacctgaaagagtttttgggccatcctcatcataacacacttctgtttttctcctttccattgtcggatgagaatgatgtttttgacaagctaagtgtcattgcagaagactctgagagcggcaagcagaatcctggtgacagctgcagcctcgggaccccgcctgggcaggggccccaaagctaggctctgagaaggaaacacactcggctgggcacagtgacgtactccatctcacatctgcctcagtgagggatcagggcagcaaacaagggccaagaccatctgagccagccccacatctagaactcccagaccctggacttagccaccagagagctacattttaaaggctgtcttggcaaaaatactccatttgggaactcactgccttataaaggctttcatgatgttttcagaagttggccactgagagtgtaattttcagccttttatatcactaaaataagatcatgttttaattgtgagaaacagggccgagcacagtggctcacgcctgtaataccagcaccttagaggtcgaggcaggcggatcacttgaggtcaggagttcaagaccagcctggccaatatggtgaaacccagtctctactaaaaatacaaaaattagctaggcatgatggcgcatgcctataatcccagctactcgagtgcctgaggcaggagaattgcatgaacccgggaggaggaggaggaggttgcagtgagccgagatagcggcactgcactccagcctgggtgacaaagtgagactccatctcaaaaaaaaaaaaaaaaaaaattgtgagaaacagaaatacttaaaatgaggaataagaatggagatgttacatctggtagatgtaacattctaccagattatggatggactgatctgaaaatcgacctcaactcaagggtggtcagctcaatgctacacagagcacggacttttggattctttgcagtactttgaatttatttttctacctatatatgttttatatgctgctggtgctccattaaagttttactctgtgttgcactatatgtgttcatgata

SEQ ID NO: 62 - DNA, 1283 bp, Homo sapiens
  source 1..1283: mol_type = genomic DNA
aagccacccagcctatgcatccgctcctcaatcctctcctgttggcactgggcctcatggcgcttttgttgaccacggtcattgctctcacttgccttggcggctttgcctccccaggccctgtgcctccctctacagccctcagggagctcattgaggagctggtcaacatcacccagaaccagaaggctccgctctgcaatggcagcatggtatggagcatcaacctgacagctggcatgtactgtgcagccctggaatccctgatcaacgtgtcaggctgcagtgccatcgagaagacccagaggatgctgagcggattctgcccgcacaaggtctcagctgggcagttttccagcttgcatgtccgagacaccaaaatcgaggtggcccagtttgtaaaggacctgctcttacatttaaagaaactttttcgcgagggacagttcaactgaaacttcgaaagcatcattatttgcagagacaggacctgactattgaagttgcagattcatttttctttctgatgtcaaaaatgtcttgggtaggcgggaaggagggttagggaggggtaaaattccttagcttagacctcagcctgtgctgcccgtcttcagcctagccgacctcagccttccccttgcccagggctcagcctggtgggcctcctctgtccagggccctgagctcggtggacccagggatgacatgtccctacacccctcccctgccctagagcacactgtagcattacagtgggtgccccccttgccagacatgtggtgggacagggacccacttcacacacaggcaactgaggcagacagcagctcaggcacacttcttcttggtcttatttattattgtgtgttatttaaatgagtgtgtttgtcaccgttggggattggggaagactgtggctgctagcacttggagccaagggttcagagactcagggccccagcactaaagcagtggacaccaggagtccctggtaataagtactgtgtacagaattctgctacctcactggggtcctggggcctcggagcctcatccgaggcagggtcaggagaggggcagaacagccgctcctgtctgccagccagcagccagctctcagccaacgagtaatttattgtttttccttgtatttaaatattaaatatgttagcaaagagttaatatatagaagggtaccttgaacactgggggaggggacattgaacaagttgtttcattgactatcaaactgaagccagaaataaagttggtgacagata

SEQ ID NO: 63 - DNA, 3661 bp, Homo sapiens
  source 1..3661: mol_type = genomic DNA
tcaggaggcggagatcgctgcttctcacctactttctgaacttggcctccgcagtcgcgacctggcgtgaaggaggagctgccgcccccgccccagcctcggggacgcctctctgaagagaagccatttgaagcagaatccaaaccatgaattgtagagaattacccttgaccctttgggtgcttatatctgtaagcactgcagaatcttgtacttcacgtccccacattactgtggttgaaggggaacctttctatctgaaacattgctcgtgttcacttgcacatgagattgaaacaaccaccaaaagctggtacaaaagcagtggatcacaggaacatgtggagctgaacccaaggagttcctcgagaattgctttgcatgattgtgttttggagttttggccagttgagttgaatgacacaggatcttactttttccaaatgaaaaattatactcagaaatggaaattaaatgtcatcagaagaaataaacacagctgtttcactgaaagacaagtaactagtaaaattgtggaagttaaaaaattttttcagataacctgtgaaaacagttactatcaaacactggtcaacagcacatcattgtataagaactgtaaaaagctactactggagaacaataaaaacccaacgataaagaagaacgccgagtttgaagatcaggggtattactcctgcgtgcatttccttcatcataatggaaaactatttaatatcaccaaaaccttcaatataacaatagtggaagatcgcagtaatatagttccggttcttcttggaccaaagcttaaccatgttgcagtggaattaggaaaaaacgtaaggctcaactgctctgctttgctgaatgaagaggatgtaatttattggatgttcggggaagaaaatggatcggatcctaatatacatgaagagaaagaaatgagaattatgactccagaaggcaaatggcatgcttcaaaagtattgagaattgaaaatattggtgaaagcaatctaaatgttttatataattgcactgtggccagcacgggaggcacagacaccaaaagcttcatcttggtgagaaaagcagacatggctgatatcccaggccacgtcttcacaagaggaatgatcatagctgttttgatcttggtggcagtagtgtgcctagtgactgtgtgtgtcatttatagagttgacttggttctattttatagacatttaacgagaagagatgaaacattaacagatggaaaaacatatgatgcttttgtgtcttacctaaaagaatgccgacctgaaaatggagaggagcacacctttgctgtggagattttgcccagggtgttggagaaacattttgggtataagttatgcatatttgaaagggatgtagtgcctggaggagctgttgttgatgaaatccactcactgatagagaaaagccgaagactaatcattgtcctaagtaaaagttatatgtctaatgaggtcaggtatgaacttgaaagtggactccatgaagcattggtggaaagaaaaattaaaataatcttaattgaatttacacctgttactgacttcacattcttgccccaatcactaaagcttttgaaatctcacagagttctgaagtggaaggccgataaatctctttcttataactcaaggttctggaagaaccttctttacttaatgcctgcaaaaacagtcaagccaggtagagacgaaccggaagtcttgcctgttctttccgagtcttaatcttcagaaacagtgaacgccaaaaagaactcaagatattctggggactgagcatatgaacctgttcataacaaaggctgtgactcgaaataattaactttgtcaaaatcctgctcacaatttgaagatgaaacttgtcattaggttggcgggaatgagactaaagattgcgctgtgggctgtggtcacgtgctcccagaagacctggaattcaaaagaaatggagctattctttttctccctctttcataactggatgcagctgctcatactcaatcccatattcagcaagtgtgaagctggacgtgatgcaaaataaccgatgccctacaaaaagggcgcatctttaagagttttaatgccagtgcttaattcgaatgaggggattttaagtgtctgaagaggcattttctagggaccagtgggtgactgagtaactgaaatgctgctttcactccctaacaccatggatctggttgtgcataggatgtgggaggaggggctggcagggccgccttcagaggctgcagggcctcagcctcaggatgcatttaatgtatcctggccacagttgcagccaacggttcttgaaagctcggtaaggccctgcaacgcagagcctgcttatgtggatctatttatgggaacttcttaaaaggaccccagaatagctctttatctttcacaagagacacaaattctaattgagttaattatctgggcctttcactttggatgctctgaaacatttgttgattttgtgtgaatgtttatatcaaaatgtttgccaggttgtattagccattgaatagcaaaaaactgatagttacttgcttgttttttaaaaattacatattaaaaatgcccttggcataaggcagcatggtgtggcagttaagagatgggctgtgcagcccatcctgagctccagtcctgagtttgctacttacttctgtggcctctggaaccttatccaacctcttggtgcttcagtttcctcatctgtgaaattagaatttataataattgcacctacctcccaggggtaactaaatgaataaatataataaagtacttacagtggttcctgacacagactcagcactccgtcagtgttgccatgactatttttattatcattattaatgattacttagatcaattatttagcagtggactaatggaagctacagagcagggaagggaagcagatctagggaggaaggcagttttgatttgaggaggtttgcacatgtagagaagcatactggagaagcatatccagagggcgaaagatatctctccattgtgcatctgcctcttttgacgttggaagacacatgtcttaccccccaaagggagcccagcactgggagccttcttgatgatctcaaaaataatagctattcaagaaaatcaccaagtgactgtgaaaccgtcagttcggaaggctggttagaacatgtgggagcaacatgaatgttctacaaaagtttaaagcagagattgtttcaaatgggtgtagtagatattactgaaaaccaaaaaagagtgagattgtcagtgtaagaatgtgatttaatgtttgtagtgcttacaattttgtgtaccaactggatgactaaaaagagtaaaataatttaattaatagctcatattttatgtgtgaaaacatgttagtgaacatatataatcaaaatagatttcattgctattgcatagtctctaatacatagaatgattttgcttttctcttttattatacttgctttaaaatacttgaaatatattttgcattaaatgcatttcaagttaaatgtcttaaatgtatacattagatgtgtgttttaaaatgcataaaacacgttgaaatacattaatgaaccatt

SEQ ID NO: 64 - DNA, 2124 bp, Homo sapiens
  source 1..2124: mol_type = genomic DNA
ttccctgtaaattccccgttttgacgacgcacttgtagccacgtagccacgcctacttaagacaattacaaaaggcgaagaagactgactcaggcttaagctgccagccagagagggagtcatttcattggcgtttgagtcagcaaagaagtcaagatggccaaagttccagacatgtttgaagacctgaagaactgttacagtgaaaatgaagaagacagttcctccattgatcatctgtctctgaatcagaaatccttctatcatgtaagctatggcccactccatgaaggctgcatggatcaatctgtgtctctgagtatctctgaaacctctaaaacatccaagcttaccttcaaggagagcatggtggtagtagcaaccaacgggaaggttctgaagaagagacggttgagtttaagccaatccatcactgatgatgacctggaggccatcgccaatgactcagaggaagaaatcatcaagcctaggtcagcaccttttagcttcctgagcaatgtgaaatacaactttatgaggatcatcaaatacgaattcatcctgaatgacgccctcaatcaaagtataattcgagccaatgatcagtacctcacggctgctgcattacataatctggatgaagcagtgaaatttgacatgggtgcttataagtcatcaaaggatgatgctaaaattaccgtgattctaagaatctcaaaaactcaattgtatgtgactgcccaagatgaagaccaaccagtgctgctgaaggagatgcctgagatacccaaaaccatcacaggtagtgagaccaacctcctcttcttctgggaaactcacggcactaagaactatttcacatcagttgcccatccaaacttgtttattgccacaaagcaagactactgggtgtgcttggcaggggggccaccctctatcactgactttcagatactggaaaaccaggcgtaggtctggagtctcacttgtctcacttgtgcagtgttgacagttcatatgtaccatgtacatgaagaagctaaatcctttactgttagtcatttgctgagcatgtactgagccttgtaattctaaatgaatgtttacactctttgtaagagtggaaccaacactaacatataatgttgttatttaaagaacaccctatattttgcatagtaccaatcattttaattattattcttcataacaattttaggaggaccagagctactgactatggctaccaaaaagactctacccatattacagatgggcaaattaaggcataagaaaactaagaaatatgcacaatagcagttgaaacaagaagccacagacctaggatttcatgatttcatttcaactgtttgccttctacttttaagttgctgatgaactcttaatcaaatagcataagtttctgggacctcagttttatcattttcaaaatggagggaataatacctaagccttcctgccgcaacagttttttatgctaatcagggaggtcattttggtaaaatacttcttgaagccgagcctcaagatgaaggcaaagcacgaaatgttattttttaattattatttatatatgtatttataaatatatttaagataattataatatactatatttatgggaaccccttcatcctctgagtgtgaccaggcatcctccacaatagcagacagtgttttctgggataagtaagtttgatttcattaatacagggcattttggtccaagttgtgcttatcccatagccaggaaactctgcattctagtacttgggagacctgtaatcatataataaatgtacattaattaccttgagccagtaattggtccgatctttgactcttttgccattaaacttacctgggcattcttgtttcaattccacctgcaatcaagtcctacaagctaaaattagatgaactcaactttgacaaccatgagaccactgttatcaaaactttcttttctggaatgtaatcaatgtttcttctaggttctaaaaattgtgatcagaccataatgttacattattatcaacaatagtgattgatagagtgttatcagtcataactaaataaagcttgcaacaaaattctctgaca

SEQ ID NO: 65 - DNA, 3176 bp, Homo sapiens
  source 1..3176: mol_type = genomic DNA
aactcctgactccgatagagactggatggacccacaagggtgacagcccaggcggaccgatcttcccatcccacatcctccggcgcgatgccaaaaagaggctgacggcaactgggccttctgcagagaaagacctccgcttcactgccccggctggtcccaagggtcaggaagatggattcatacctgctgatgtggggactgctcacgttcatcatggtgcctggctgccaggcagagctctgtgacgatgacccgccagagatcccacacgccacattcaaagccatggcctacaaggaaggaaccatgttgaactgtgaatgcaagagaggtttccgcagaataaaaagcgggtcactctatatgctctgtacaggaaactctagccactcgtcctgggacaaccaatgtcaatgcacaagctctgccactcggaacacaacgaaacaagtgacacctcaacctgaagaacagaaagaaaggaaaaccacagaaatgcaaagtccaatgcagccagtggaccaagcgagccttccaggtcactgcagggaacctccaccatgggaaaatgaagccacagagagaatttatcatttcgtggtggggcagatggtttattatcagtgcgtccagggatacagggctctacacagaggtcctgctgagagcgtctgcaaaatgacccacgggaagacaaggtggacccagccccagctcatatgcacaggtgaaatggagaccagtcagtttccaggtgaagagaagcctcaggcaagccccgaaggccgtcctgagagtgagacttcctgcctcgtcacaacaacagattttcaaatacagacagaaatggctgcaaccatggagacgtccatatttacaacagagtaccaggtagcagtggccggctgtgttttcctgctgatcagcgtcctcctcctgagtgggctcacctggcagcggagacagaggaagagtagaagaacaatctagaaaaccaaaagaacaagaatttcttggtaagaagccgggaacagacaacagaagtcatgaagcccaagtgaaatcaaaggtgctaaatggtcgcccaggagacatccgttgtgcttgcctgcgttttggaagctctgaagtcacatcacaggacacggggcagtggcaaccttgtctctatgccagctcagtcccatcagagagcgagcgctacccacttctaaatagcaatttcgccgttgaagaggaagggcaaaaccactagaactctccatcttattttcatgtatatgtgttcattaaagcatgaatggtatggaactctctccaccctatatgtagtataaagaaaagtaggtttacattcatctcattccaacttcccagttcaggagtcccaaggaaagccccagcactaacgtaaatacacaacacacacactctaccctatacaactggacattgtctgcgtggttcctttctcagccgcttctgactgctgattctcccgttcacgttgcctaataaacatccttcaagaactctgggctgctacccagaaatcattttacccttggctcaatcctctaagctaacccccttctactgagccttcagtcttgaatttctaaaaaacagaggccatggcagaataatctttgggtaacttcaaaacggggcagccaaacccatgaggcaatgtcaggaacagaaggatgaatgaggtcccaggcagagaatcatacttagcaaagttttacctgtgcgttactaattggcctctttaagagttagtttctttgggattgctatgaatgataccctgaatttggcctgcactaatttgatgtttacaggtggacacacaaggtgcaaatcaatgcgtacgtttcctgagaagtgtctaaaaacaccaaaaagggatccgtacattcaatgtttatgcaaggaaggaaagaaagaaggaagtgaagagggagaagggatggaggtcacactggtagaacgtaaccacggaaaagagcgcatcaggcctggcacggtggctcaggcctataaccccagctccctaggagaccaaggcgggagcatctcttgaggccaggagtttgagaccagcctgggcagcatagcaagacacatccctacaaaaaattagaaattggctggatgtggtggcatacgcctgtagtcctagccactcaggaggctgaggcaggaggattgcttgagcccaggagttcgaggctgcagtcagtcatgatggcaccactgcactccagcctgggcaacagagcaagatcctgtctttaaggaaaaaaagacaagatgagcataccagcagtccttgaacattatcaaaaagttcagcatattagaatcaccgggaggccttgttaaaagagttcgctgggcccatcttcagagtctctgagttgttggtctggaatagagccaaatgttttgtgtgtctaacaattcccaggtgctgttgctgctgctactattccaggaacacactttgagaaccattgtgttattgctctgcacgcccacccactctcaactcccacgaaaaaaatcaacttccagagctaagatttcggtggaagtcctggttccatatctggtgcaagatctcccctcacgaatcagttgagtcaacattctagctcaacaacatcacacgattaacattaacgaaaattattcatttgggaaactatcagccagttttcacttctgaaggggcaggagagtgttatgagaaatcacggcagttttcagcagggtccagattcagattaaataactattttctgtcatttctgtgaccaaccacatacaaacagactcatctgtgcactctccccctcccccttcaggtatatgttttctgagtaaagttgaaaagaatctcagaccagaaaatatagatatatatttaaatcttacttgagtagaactgattacgacttttgggtgttgaggggtctataagatcaaaacttttccatgataatactaagatgttatcgaccatttatctgtccttctctcaaaagtgtatggtggaattttccagaagctatgtgatacgtgatgatgtcatcactctgctgttaacatataataaatttattgctattgtttataaaagaataaatgatattttttaaaaa

SEQ ID NO: 66 - DNA, 6354 bp, Homo sapiens
  source 1..6354: mol_type = genomic DNA
gctctgctgctctcgcgatatttgcgcgagcctgcttccttctttcctcccttgccagtccgcctgtcttcctccccgtcttccctgcccggcctcccccttcttcccccgctggccccctccccggagggataatatggtctccggcgatggacgccccaaaagcaggatacgcctttgagtaccttattgaaacattaaatgacagttcacataagaagttcttcgatgtatctaaacttggcaccaagtatgatgttctgccttactcaatacgggtcttgttggaagctgctgtacgaaattgtgatggctttttaatgaagaaggaagatgttatgaacattttagactggaaaaccaaacaaagcaatgttgaagtgccctttttccctgcccgtgttcttcttcaagattttactggaataccagcaatggtggattttgctgctatgagggaggcagtgaaaactcttggaggtgatcctgagaaagtccatcctgcttgtccgacagatcttacagttgaccattctttacaaattgacttcagtaaatgtgcaatacagaatgcaccaaatcctggaggtggtgacctgcagaaagcaggaaagctctctccacttaaagtgcagcctaagaagcttccctgcagaggccagactacctgccgaggatcttgtgattctggagaactaggccgaaactcaggaacattttcttcgcagattgagaatacacccatcctgtgtccttttcatttgcaaccagtgcctgaacctgaaacagtgttaaaaaatcaagaagtagaattcggcagaaatcgagagaggcttcagttttttaagtggagttcaagagtttttaagaatgtggcagtgatccctcctggaactggaatggctcatcaaataaacttagaatatttgtcaagagtggtttttgaagaaaaagacctcctcttcccagacagtgtagtcggcacagattcacacataacgatggtgaatggtttagggattctggggtggggggttggaggcattgaaacagaagcagttatgcttggtctgccagtttctcttactttaccagaggtggttggatgtgagttaactgggtcatcaaacccttttgttacatccatagatgttgttcttggtattacaaagcacctcaggcaagtaggagtggctggaaagtttgttgagttttttggaagtggagtttcacaattatctatagttgatcgaactacaatagcaaacatgtgtccggaatatggtgctatcctcagctttttccctgttgacaatgtgacattaaaacatttagaacatacaggttttagcaaagccaaactcgaatcaatggaaacataccttaaagctgtgaaattgtttcgaaatgaccagaattcttcaggagaacctgaatactcccaggtgatccagattaatctgaattcaatagttccatctgttagtggtccaaaaagacctcaggatagagttgctgtgacagatatgaaaagcgatttccaggcttgcttaaatgaaaaggttggatttaaaggcttccaaattgcagctgaaaaacaaaaggatattgtctccattcattatgaaggaagtgaatataagctgtctcatggatcagtggtcattgctgcagttatcagttgtaccaataattgcaatccatctgtcatgcttgctgcaggtcttttggctaaaaaggctgttgaagctggtctgcgtgttaaaccttatataagaacaagtttatctccaggcagtgggatggttacacattacctcagttcaagtggagtattaccatatctaagtaagcttggatttgaaatcgttggctatggatgttcaatttgtgtgggaaatacagcacccttatcagacgcagttttaaatgcagtaaaacagggtgatttggttacctgtggaattttatctggaaacaaaaattttgaaggtcgtctttgtgattgtgttcgtgccaattatcttgcctctccacccttagtggtagcttatgccatagcaggcacagtgaatatagatttccagacagaacctttaggtactgaccccaccggcaagaacatttacctgcatgatatttggcctagtcgagaagaagttcatcgagtagaggaagaacatgttatactatccatgtttaaagcattaaaagataaaatagaaatggggaataaacggtggaattccttagaagcaccggattcagttttgtttccatgggacttaaagtctacttatatcagatgcccttcattttttgataaacttaccaaagagccaattgcactccaggctattgaaaatgcccatgtcttattatatttgggagactctgtcacaacagatcatatatcacctgcaggaagtatcgctaggaatagtgctgccgctaagtatttgacaaacagaggccttacccctcgtgaattcaactcttacggagctcgaagaggtaatgatgctgtaatgacaagaggcacttttgcaaatatcaagctttttaataagtttattggaaaaccagctcctaaaacaattcattttccatcaggacagacgctagatgtatttgaggctgcagagctgtaccagaaagaaggtatcccactgattattttagcaggaaagaaatatggttcaggaaactccagagactgggctgccaaaggaccgtatttactgggtgtgaaagctgttttggccgaaagttatgaaaaaatacacaaagatcatttgattggaattggcatagctccacttcagttccttccaggagaaaatgcagattccttgggcctctccggtagagaaacattttctttaacatttcctgaagaactgtctcctggaattacattgaatatacagacaagcactggaaaagtattcagcgtgattgcttcgtttgaagatgatgtggaaataacattatacaaacatggaggattattaaactttgtggcacgaaaattctcatagtatctacttaccatagatacctttcataactggtaactgcaaagccttttgtgctggacccaggaatccttaccatggagcagcagatagtcccagtatactcacttatctcatccatggatgtaaatgatgatgaatcaacatagtaactgaaatgaaatcttcttgattttaaataatatacgaatggtgctattaatattgctaaaatcaacgtgtgaagtgtgttgtggaagagacctgtaagtatggggggggggcgatattttatcagaccattttgtaaataaaggcagaatttgtgttgaagattcttatatgaataaccttcctggatttgtttagttttgcaccaataaaactgtgtactactgtttgttggtttaagagtagcagattgaaatataagaagccagattagactctaaaattgtggccattggaatctcatttataaatggaccttttaagtatattaattcctcttcagaattgagctggacacatttggcattcttagtttgtcatataaccaggtttatccttagtctaactgcaagggatggaacctgccccaggtcacaatcattctgtccaatccagccaaggttccctccacatatgaagatggaccatggcaggatacaactgattgtgtggcaccatgtattagcagtgggaatatgtatcacatatgatgcagcctttcatatttcagcagtttgccactgtgactgtctggcaagcccccagatggcgttatattaattggattagattattttgctcaccttatgtaatactgtaacttcctataacctaatattttcggtatcattaaccaaaatttcacactcatagttgctaaagagaatgttattcaatcattaaactctgaactgatttcttctatacatttaaattatccaccctcaataatacgggtgctcaaccctatgcattttttaagtgttgctatttcttaattaaattgatttcctgtcattttgaatcatttatcacctgcgatgcatgattctattaattttgttatgttactgttttaaccaaagctgaccgtaaggataaaacacttaagttgttgctgagtactatatatcctcaatatgcatgtctgcccatcacatcaaatgttctgtcaacaagatgtttggtaattttttttaaaaaggttggaaaattaattatagaaggttctatactgtttttttaattaagaaactaagtctagcaggctaaaggttaattgtagtgattttttttcacatagatatctttctatgacctagttagttactgcaattcagaattagttcacattgcataaagaattacttgttgtaagcaaaatgctgaaactaccaaaccagtggatgaagaccactaagaactttgcacataatcatacaatcttttgaaaatattttgcaaatatgtgtttagacaataagatggactagagttcgacaaaatgatttctttatttaaattttgtataagtattttcttcgacactttcaaattatattgtgttcttgatatatgctgtatatttatttgttagtgcatgtgtttttaatttacatgaaaacatgagttaggagaaattacaggttgaaagatgaaatgcctgtatgtgctctgaagaaatggtaattccagattgtgcagggggaaacaaatctattttgttttgttttgttttttgagacggagtcttgccctgtggctgggctggagtgcaatggcgcgatcttggctcactgcaacctccgcctcccgggttcaggggattctcctgcctcagcctcctgagtagctgggactacaagcatgcaccaccacgcccagctaatttttgtagttttagtagagatggggtttcaccatgttggccagatgatctgaatctcttgacctcgtgatccgcccgccttggcctccacaagtgctgggattacaggtgtgagccaccacacccggcctatattgttttgaaagcatactctatatatagttatgggcagaggcacaggcatcctcagcagctgattcaggagatgatggtaaagctagctaactatgaattaaacattcacatatccagtctacctggtccagtaataatacaagcaaatcttgtatttcaggaacaaatcaaggttctcttaattttttggcttatatacaatgaagtaaaaacttgataaacatggtttcaaattgaggaggagagtcttggatgtatgttttaatatgtataccttataattctgcctctagccaaatgctatgtttgcaaaatgtggcatctgttagtttttattgtctgtgtcttctttgtttactataccttgggtaattttgtgttaccaaaaaaaaaaaaaaaaaaaggaagtgtaatgtcagacacacaagaaaagcaaatcagtgttgtaagcttaaagtacaatttcaaaggtcactaccaacagcagggttttttttatactttgaaaacattatgctacatatcattgccattttcatattttggggttttgctactcttatacaatggaatcaatggaaatgtcatccagccactgaattgccattattatatctaaaaagtttctaagatgacagttatcactattttgttttatctccatgctgacatttgaaagaaggtactagtatccctctagccagattgcttagtttttcgttggtaatcaaacaacagttgtactaaaggaaagtaaagctaggacctaaatcagaatcatagttgcctgcatatatggtaacaaggtcgtgtgcatttgctttcacagtgatgagtgagaggatgagaagaaattatttgacatttttctgtggttgaatagaagacacctttcttttgtctttaggtttaggaggagatactaagatactggatgtttatcctatcttagtttggttggagtaataagagagaagaagagggtggactttggcttttcagtgttttttcccctaaagagtgatattgctgacgtttctatcaattttacacataatatgtggctatgaaaccatatatctcacttaagtaacaaagtaatcactttgtctatcactaagtaatagacaaaaatcattgtctattatttaaagccaacaaaacagtgtaacagttttaagttcaataatgttaagtattgtatagaaatatattggaggcaaagttcagttgatgacaattgtgtatatgttactgatgctgtaaattatttttaataaagaaaattgtattatcacattt

SEQ ID NO: 67 - DNA, 2303 bp, Homo sapiens
  source 1..2303: mol_type = genomic DNA
ggatttccagccgcggctcttcgcagtttcctctccttgttttgctttcgatctggactgttctcaggcaagccggggagtaacttttagttttgctcctgcgattattcaactgacgggctttcatttccatttcacataccctagcaacacttataccttgcggaattgtattggtagcgtgaaaaaagcacactgagagggcaccatgccggtggaaaggatgcgcatgcgcccgtggctggaggagcagataaactccaacacgatcccggggctcaagtggcttaacaaggaaaagaagatttttcagatcccctggatgcatgcggctagacatgggtgggatgtggaaaaagatgcaccactctttagaaactgggcaatccatacaggaaagcatcaaccaggagtagataaacctgatcccaaaacatggaaggcgaatttcagatgcgccatgaattccttgcctgatattgaagaagtcaaggataaaagcataaagaaaggaaataatgccttcagggtctaccgaatgctgcccctatcagaacggccttctaagaaaggaaagaaaccaaagacagaaaaagaagacaaagttaagcacatcaagcaagaaccagttgagtcatctctggggcttagtaatggagtaagtgatctttctcctgagtatgcggtcctgacttcaactataaaaaatgaagtggatagtacggtgaacatcatagttgtaggacagtcccatctggacagcaacattgagaatcaagagattgtcaccaatccgccagacatttgccaagttgtagaggtgaccactgagagcgacgagcagccggtcagcatgagcgagctctaccctctgcagatctcccccgtgtcttcctatgcagaaagcgaaacgactgatagtgtgcccagcgatgaagagagtgccgaggggcggccacactggcggaagaggaatattgaaggcaaacagtacctcagcaacatggggactcgaggctcctacctgctgcccggcatggcgtccttcgtcacttccaacaaaccggacctccaggtcaccatcaaagaggagagcaatccggtgccttacaacagctcctggcccccttttcaagacctccccctttcttcctccatgaccccagcatccagcagcagtcggccagaccgggagacccgggccagcgtcatcaagaaaacatcggatatcacccaggcccgcgtcaagagctgttaagcctctgactctccgcggtggttgttggggcttcttggctttgttttgttgtttgtttgtattttatttttttctctctgacacctattttagacaaatctaagggaaaaagccttgacaatagaacattgattgctgtgtccaactccagtactggagcttctctttaactcaggactccagcccattggtagacgtgtgtttctagagcctgctggatctcccagggctactcactcaagttcaaggaccaacaagggcagtggaggtgctgcattgcctgcggtcaaggccagcaaggtggagtggatgcctcagaacggacgagataatgtgaactagctggaattttttattcttgtgaatatgtacataggcagcactagcgacattgcagtctgcttctgcaccttatcttaaagcacttacagataggccttcttgtgatcttgctctatctcacagcacactcagcacccccttctctgcccattccccagcctctcttcctatcccatcccatcccatcccatcccatcccatcccatcccgctcttttcctacttttccttccctcaaagcttccattccacatccggaggagaagaaggaaatgaatttctctacagatgtcccattttcagactgctttaaaaaaaatccttctaatctgctatgcttgaatgccacgcggtacaaaggaaaaagtatcatggaaatattatgcaaattcccagatttgaagacaaaaatactctaattctaaccagagcaagcttttttattttttatacaggggaatattttattcaaggtaaaattctaaataaaatataattgttttttatcttttctacagcaaatttataattttaagattccttttcttgtttatcagcagttgttattacatccttgtggcacatttttttttttaattttgtaaaggtgaaaaaagcttttatgagctcatgtagcaatcagattttcctgtggattgataataaatgaatatgatatatagttaaatttttaaggggcatca

SEQ ID NO: 68 - DNA, 5331 bp, Homo sapiens
  source 1..5331: mol_type = genomic DNA
acctcgcactctcagtttcaccgctcgatcttgggacccaccgctgccctcagctccgagtccagggcgagtgcagagcagagcgggcggaggaccccgggcgcgggcgcggacggcacgcggggcatgaacctggagggcggcggccgaggcggagagttcggcatgagcgcggtgagctgcggcaacgggaagctccgccagtggctgatcgaccagatcgacagcggcaagtaccccgggctggtgtgggagaacgaggagaagagcatcttccgcatcccctggaagcacgcgggcaagcaggactacaaccgcgaggaggacgccgcgctcttcaaggcttgggcactgtttaaaggaaagttccgagaaggcatcgacaagccggaccctcccacctggaagacgcgcctgcggtgcgctttgaacaagagcaatgactttgaggaactggttgagcggagccagctggacatctcagacccgtacaaagtgtacaggattgttcctgagggagccaaaaaaggagccaagcagctcaccctggaggacccgcagatgtccatgagccacccctacaccatgacaacgccttacccttcgctcccagcccagcaggttcacaactacatgatgccacccctcgaccgaagctggagggactacgtcccggatcagccacacccggaaatcccgtaccaatgtcccatgacgtttggaccccgcggccaccactggcaaggcccagcttgtgaaaatggttgccaggtgacaggaaccttttatgcttgtgccccacctgagtcccaggctcccggagtccccacagagccaagcataaggtctgccgaagccttggcgttctcagactgccggctgcacatctgcctgtactaccgggaaatcctcgtgaaggagctgaccacgtccagccccgagggctgccggatctcccatggacatacgtatgacgccagcaacctggaccaggtcctgttcccctacccagaggacaatggccagaggaaaaacattgagaagctgctgagccacctggagaggggcgtggtcctctggatggcccccgacgggctctatgcgaaaagactgtgccagagcaggatctactgggacgggcccctggcgctgtgcaacgaccggcccaacaaactggagagagaccagacctgcaagctctttgacacacagcagttcttgtcagagctgcaagcgtttgctcaccacggccgctccctgccaagattccaggtgactctatgctttggagaggagtttccagaccctcagaggcaaagaaagctcatcacagctcacgtagaacctctgctagccagacaactatattattttgctcaacaaaacagtggacatttcctgaggggctacgatttaccagaacacatcagcaatccagaagattaccacagatctatccgccattcctctattcaagaatgaaaaatgtcaagatgagtggttttctttttcctttttttttttttttttttgatacggggatacggggtcttgctctgtctcccaggctggagtgcagtgacacaatctcagctcactgtgacctccgcctcctgggttcaagagactctcctgcctcagcctccctggtagctgggattacaggtgtgagccactgcacccacccaagacaagtgattttcattgtaaatatttgactttagtgaaagcgtccaattgactgccctcttactgttttgaggaattcagaagtggagatttcagttcagcggttgaggagaattgcggcgagacaagcatggaaaatcagtgacatctgattggcagatgagcttatttcaaaaggaagggtggctttgcatttcttgtgttctgtagactgccatcattgatgatcactgtgaaaattgaccaagtgatgtgtttacatttactgaaatgcgctctttaatttgttgtagattaggtcttgctggaagacagagaaaacttgcctttcagtattgacactgactagagtgatgactgcttgtaggtatgtctgtgccatttctcagggaagtaagatgtaaattgaagaagcctcacacgtaaaagaaatgtattaatgtatgtaggagctgcagttcttgtggaagacacttgctgagtgaaggaaatgaatctttgactgaagccgtgcctgtagccttggggaggcccatcccccacctgccagcggtttcctggtgtgggtccctctgccccgccctccttcccattggctttctctccttggcctttcctggaagccagttagtaaacttcctattttcttgagtcaaaaaacatgagcgctactcttggatgggacatttttgtctgtcctacaatctagtaatgtctaagtaatggttaagttttcttgtttctgcatctttttgaccctcattctttagagatgctaaaattcttcgcataaagaagaagaaattaaggaacataaatcttaatacttgaactgttgcccttctgtccaagtacttaactatctgttcccttcctctgtgccacgctcctctgtttgtttggctgtccagcgatcagccatggcgacactaaaggaggaggagccggggactcccaggctggagagcactgccaggacccaccactggaagcaggatggagctgactacggaactgcacactcagtgggctgtttctgcttatttcatctgttctatgcttcctcgtgccaattatagtttgacagggccttaaaattacttggctttttccaaatgcttctatttatagaatcccaaagacctccacttgcttaagtatacctatcacttacatttttgtggttttgagaaagtacagcagtagactggggcgtcacctccaggccgtttctcatactacaggatatttactattactcccaggatcagcagaagattgcgtagctctcaaatgtgtgttcctgcttttctaatggatattttaaattcattcaacaagcacctagtaagtgcctgctgtatccctacattacacagttcagcctttatcaagcttagtgagcagtgagcactgaaacattattttttaatgtttaaaaagtttctaatattaaagtcagaatattaatacaattaatattaatattaactacagaaaagacaaacagtagagaacagcaaaaaaataaaaaggatctccttttttcccagcccaaattctcctctctaaaagtgtccacaagaaggggtgtttattcttccaacacatttcacttttctgtaaatatacataaacttaaaaagaaaacctcatggagtcatcttgcacacactttcatgcagtgctctttgtagctaacagtgaagatttacctcgttctgctcagaggccttgctgtggagctccactgccatgtacccagtagggtttgacatttcattagccatgcaacatggatatgtattgggcagcagactgtgtttcgtgaactgcagtgatgtatacatcttatagatgcaaagtattttggggtatattatcctaagggaagataaagatgatattaagaactgctgtttcacggggcccttacctgtgaccctctttgctgaagaatatttaaccccacacagcacttcaaagaagctgtcttggaagtctgtctcaggagcaccctgtcttcttaattctccaagcggatgctccatttcaattgctttgtgacttcttcttctttgtttttttaaatattatgctgctttaacagtggagctgaattttctggaaaatgcttcttggctggggccactacctcctttcctatctttacatctatgtgtatgttgactttttaaaattctgagtgatccagggtatgacctagggaatgaactagctatgaaatactcagggttaggaatcctagcacttgtctcaggactctgaaaaggaacggcttcctcattccttgtcttgataaagtggaattggcaaactagaatttagtttgtactcagtggacagtgctgttgaagatttgaggacttgttaaagagcactgggtcatatggaaaaaatgtatgtgtctcccaggtgcatttcttggtttatgtcttgttcttgagattttgtatatttaggaaaacctcaagcagtaattaatatctcctggaacactatagagaaccaagtgaccgactcatttacaactgaaacctaggaagcccctgagtcctgagcgaaaacaggagagttagtcgccctacagaaaacccagctagactattgggtatgaactaaaaagagactgtgccatggtgagaaaaatgtaaaatcctacagtgaaatgagcagcccttacagtattgttaccaccaagggcaggtaggtattagtgtttgaaaaagctggtctttgagcgagggcataaatacagctagccccaggggtggaacaactctgggagtcttgggtactcgcacctcttggctttgttgatgctccgccaggaaggccacttgtgtgtgcgtgtcagttacttttttagtaacaattcagatccagtgtaaacttccgttcattgctctccagtcacatgcccccacttccccacaggtgaaagtttttctgaaagtgttgggattggttaaggtctttatttgtattacgtatctccccaagtcctctgtggccagctgcatctgtctgaatggtgcgtgaaggctctcagaccttacacaccattttgtaagttatgttttacatgccccgtttttgagactgatctcgatgcaggtggatctccttgagatcctgatagcctgttacaggaatgaagtaaaggtcagtttttttttgtattgattttcacagctttgaggaacatgcataagaaatgtagctgaagtagaggggacgtgagagaagggccaggccggcaggccaaccctcctccaatggaaattcccgtgttgcttcaaactgagacagatgggacttaacaggcaatggggtccacttccccctcttcagcatcccccgtaccccactttctgctgaaagaactgccagcaggtaggaccccagaggcccccaaatgaaagcttgaatttcccctactggctctgcgttttgctgagatctgtaggaaaggatgcttcacaaactgaggtagataatgctatgctgtcgttggtatacatcatgaatttttatgtaaattgctctgcaaagcaaattgatatgtttgataaatttatgtttttaggtaaataaaaacttttaaaaatttgttatgga

SEQ ID NO: 69 - DNA, 4528 bp, Homo sapiens
  source 1..4528: mol_type = genomic DNA
gttgatagaaagataacgttgaaggcaagttgcccttgagcagctctctgaagatcaactgcctccacattgcattctttgccccaaaactctttcctttggttgtgctaagaggtgatgcccaaggtgcaccacctttcaagaactggatcatgaacaactttatcctcctggaagaacagctcatcaagaaatcccaacaaaagagaagaacttctccctcgaactttaaagtccgcttctttgtgttaaccaaagccagcctggcatactttgaagatcgtcatgggaagaagcgcacgctgaaggggtccattgagctctcccgaatcaaatgtgttgagattgtgaaaagtgacatcagcatcccatgccactataaatacccgtttcaggtggtgcatgacaactacctcctatatgtgtttgctccagatcgtgagagccggcagcgctgggtgctggcccttaaagaagaaacgaggaataataacagtttggtgcctaaatatcatcctaatttctggatggatgggaagtggaggtgctgttctcagctggagaagcttgcaacaggctgtgcccaatatgatccaaccaagaatgcttcaaagaagcctcttcctcctactcctgaagacaacaggcgaccactttgggaacctgaagaaactgtggtcattgccttatatgactaccaaaccaatgatcctcaggaactcgcactgcggcgcaacgaagagtactgcctgctggacagttctgagattcactggtggagagtccaggacaggaatgggcatgaaggatatgtaccaagcagttatctggtggaaaaatctccaaataatctggaaacctatgagtggtacaataagagtatcagccgagacaaagctgaaaaacttcttttggacacaggcaaagaaggagccttcatggtaagggattccaggactgcaggaacatacaccgtgtctgttttcaccaaggctgttgtaagtgagaacaatccctgtataaagcattatcacatcaaggaaacaaatgacaatcctaagcgatactatgtggctgaaaagtatgtgttcgattccatccctcttctcatcaactatcaccaacataatggaggaggcctggtgactcgactccggtatccagtttgttttgggaggcagaaagccccagttacagcagggctgagatacgggaaatgggtgatcgacccctcagagctcacttttgtgcaagagattggcagtgggcaatttgggttggtgcatctgggctactggctcaacaaggacaaggtggctatcaaaaccattcgggaaggggctatgtcagaagaggacttcatagaggaggctgaagtaatgatgaaactctctcatcccaaactggtgcagctgtatggggtgtgcctggagcaggcccccatctgcctggtgtttgagttcatggagcacggctgcctgtcagattatctacgcacccagcggggactttttgctgcagagaccctgctgggcatgtgtctggatgtgtgtgagggcatggcctacctggaagaggcatgtgtcatccacagagacttggctgccagaaattgtttggtgggagaaaaccaagtcatcaaggtgtctgactttgggatgacaaggttcgttctggatgatcagtacaccagttccacaggcaccaaattcccggtgaagtgggcatccccagaggttttctctttcagtcgctatagcagcaagtccgatgtgtggtcatttggtgtgctgatgtgggaagttttcagtgaaggcaaaatcccgtatgaaaaccgaagcaactcagaggtggtggaagacatcagtaccggatttcggttgtacaagccccggctggcctccacacacgtctaccagattatgaatcactgctggaaagagagaccagaagatcggccagccttctccagactgctgcgtcaactggctgaaattgcagaatcaggactttagtagagactgagtaccaggccacgggctgcagatcctgaatggaggaaggatatgtcctcattccatagagcattagaagctgccaccagcccaggaccctccagaggcagcctggcctgtggcatcagtccctgagtcaccatggaagcagcatcctgaccacagctggcagtcaagccacagctggagggtcagccaccaagctgggagctgagccagaacaggagtgatgtctctgcccttcctctagcctcttgtcacatgtggtgcacaaacctcaacctgacagctttcagacagcattcttgcacttcttagcaacagagagagacatgagtaagacccagattgctatttttattgttatttttaacatgaatctaaagtttatggttccagggactttttatttgacccaacaacacagtatcccaggatatggaggcaaggggaacaaagagcatgagtctttttccaagaaaactggtgagttaagtaagattagagtgagtgtgctctgttgctgtgatgctgtcagccacagcttcctgccgtagagaatgatagagcagctgctcacacaggaggccggatattctgagaagcagctttatgaggttttacagagtatgctgctacctctctccttgaagggagcatggcgagacccattggatggattggggtgaacagttcaggtcccatgcttggagcattgggtatctgatgtctgcaccagaacaagagaacctctgacggtggagaaccatgtggtgcaagaagagatcttaggtctcttcttttataccaagctcatcttttataccaagctgtgcaggtgactatgcctcctcttctgcacagaatgcttccaccagcatcctgagaagaaatgattacttctgaaaaacatccttttttccagcctctgggaatcagccccccctctctgcactatccgatcctcatcaacagagggcagcattgtgttggtcaatgttcccttggcgagcaattgaaacttgtttaggccctagggttgagcaattttaaggttgagactccaagtctcctaaaattctaggagagaaataaagagtctgtttttgctcaaaccatcaggatggaaacagtcaggcactgactggggtgcttccaagaggcatgagagtgcctactctggcttgagcacttctatatgcaaggtgaatatgtactgagctaggagacttccctgcaaaatctctgttcaccctgggttcacatccccatgaggtaatattattattcccattttacaaataatgtaactgaggctttaaaaagccaagacatctgcccaaagtgatggaactagaaagtctagagctggtattctagcccaaatctgtctgaccgcaatacacagattctttattcctattcgacactggcttctactgaaaatgaaacggattgcagagggaataaatacaaagatggaaagccagtaaagaagtcagtatagaaccactagcgaatagtgttgctctggcacagaccactgtggttgatggcatggccctccaacttggaataggattttccttttcctattctgtatccttaccttggtcatgttaatgactttggagttattcagttaatgaccctttaattctcacaaccaaccagtcatgttgcttgaagccatttatagacgagcttcaaagcaactttaaaagattcttctgtagaagtatgagttcttcctttaattatcattccaactttcagctgtagtcttcttgaacacttcatgaggagggacattccctgatataagagaggatggtgttgcaattggctctttctaaatcatgtgacgttttgactggcttgagattcagatgcataatttttaattataattattgtgaagtggagagcctcaagataaaactctgtcattcagaagatgattttactcagcttatccaaaattatctctgtttactttttagaattttgtacattatcttttgggatccttaattagagatgatttctggaacattcagtctagaaagaaaacattggaattgactgatctctgtggtttggtttagaaaattcccctgtgcatggtattacctttttcaagctcagattcatctaatcctcaactgtacatgtgtacattcttcacctcctggtgccctatcccgcaaaatgggcttcctgcctggtttttctcttctcacattttttaaatggtcccctgtgtttgtagagaactcccttatacagagttttggttctagttttatttcgtagattttgcattttgtaccttttgagactatgtatttatatttggatcagatgcatatttattaatgtacagtcactgctagtgttcaaaataaaaatgttacaaatacctgttatcctttgtagagcacacagagttaaaagttgaatatagcaatattaaagctgcattttaataaatatggtgcatagggcctcgg

SEQ ID NO: 70 - DNA, 1820 bp, Homo sapiens
  source 1..1820: mol_type = genomic DNA
gagcggccaggccagcctcggagccagcagggagctgggagctgggggaaacgacgccaggaaagctatcgcgccagagagggcgacgggggctcgggaagcctgacagggcttttgcgcacagctgccggctggctgctacccgcccgcgccagcccccgagaacgcgcgaccaggcacccagtccggtcaccgcagcggagagctcgccgctcgctgcagcgaggcccggagcggccccgcagggaccctccccagaccgcctgggccgcccggatgtgcactaaaatggaacagcccttctaccacgacgactcatacacagctacgggatacggccgggcccctggtggcctctctctacacgactacaaactcctgaaaccgagcctggcggtcaacctggccgacccctaccggagtctcaaagcgcctggggctcgcggacccggcccagagggcggcggtggcggcagctacttttctggtcagggctcggacaccggcgcgtctctcaagctcgcctcttcggagctggaacgcctgattgtccccaacagcaacggcgtgatcacgacgacgcctacacccccgggacagtacttttacccccgcgggggtggcagcggtggaggtgcagggggcgcagggggcggcgtcaccgaggagcaggagggcttcgccgacggctttgtcaaagccctggacgatctgcacaagatgaaccacgtgacaccccccaacgtgtccctgggcgctaccggggggcccccggctgggcccgggggcgtctacgccggcccggagccacctcccgtttacaccaacctcagcagctactccccagcctctgcgtcctcgggaggcgccggggctgccgtcgggaccgggagctcgtacccgacgaccaccatcagctacctcccacacgcgccgcccttcgccggtggccacccggcgcagctgggcttgggccgcggcgcctccaccttcaaggaggaaccgcagaccgtgccggaggcgcgcagccgggacgccacgccgccggtgtcccccatcaacatggaagaccaagagcgcatcaaagtggagcgcaagcggctgcggaaccggctggcggccaccaagtgccggaagcggaagctggagcgcatcgcgcgcctggaggacaaggtgaagacgctcaaggccgagaacgcggggctgtcgagtaccgccggcctcctccgggagcaggtggcccagctcaaacagaaggtcatgacccacgtcagcaacggctgtcagctgctgcttggggtcaagggacacgccttctgaacgtcccctgcccctttacggacaccccctcgcttggacggctgggcacacgcctcccactggggtccagggagcaggcggtgggcacccaccctgggacctaggggcgccgcaaaccacactggactccggccctcctaccctgcgcccagtccttccacctcgacgtttacaagcccccccttccacttttttttgtatgttttttttctgctggaaacagactcgattcatattgaatataatatatttgtgtatttaacagggaggggaagagggggcgatcgcggcggagctggccccgccgcctggtactcaagcccgcggggacattgggaaggggacccccgccccctgccctcccctctctgcaccgtactgtggaaaagaaacacgcacttagtctctaaagagtttattttaagacgtgtttgtgtttgtgtgtgtttgttctttttattgaatctatttaagtaaaaaaaaaattggttctttattaa

SEQ ID NO: 71 - DNA, 3033 bp, Homo sapiens
  source 1..3033: mol_type = genomic DNA
ggcgcggcgggagcgcgcttggcgcgtgcgtacgcgacggcggttggcggcgcgcgggcagcgtgaagcgaggcgaggcaaggcttttcggacccacggagcgacagagcgagcggcccctacggccgtcggcggcccggcggcccgagatgttatctgggaagaaggcggcagccgcggcggcggcggctgcagcggcagcaaccgggacggaggctggccctgggacagcaggcggctccgagaacgggtctgaggtggccgcgcagcccgcgggcctgtcgggcccagccgaggtcgggccgggggcggtgggggagcgcacaccccgcaagaaagagcctccgcgggcctcgccccccgggggcctggcggaaccgccggggtccgcagggcctcaggccggccctactgtcgtgcctgggtctgcgacccccatggaaactggaatagcagagactccggaggggcgtcggaccagccggcgcaagcgggcgaaggtagagtacagagagatggatgaaagcttggccaacctctcagaagatgagtattattcagaagaagagagaaatgccaaagcagagaaggaaaagaagcttcccccaccaccccctcaagccccacctgaggaagaaaatgaaagtgagcctgaagaaccatcgggtgtggagggcgcagctttccagagccgacttcctcatgaccggatgacttctcaagaagcagcctgttttccagatattatcagtggaccacaacagacccagaaggtttttcttttcattagaaaccgcacactgcagttgtggttggataatccaaagattcagctgacatttgaggctactctccaacaattagaagcaccttataacagtgatactgtgcttgtccaccgagttcacagttatttagagcgtcatggtcttatcaacttcggcatctataagaggataaaacccctaccaactaaaaagacaggaaaggtaattattataggctctggggtctcaggcttggcagcagctcgacagttacaaagttttggaatggatgtcacacttttggaagccagggatcgtgtgggtggacgagttgccacatttcgcaaaggaaactatgtagctgatcttggagccatggtggtaacaggtcttggagggaatcctatggctgtggtcagcaaacaagtaaatatggaactggccaagatcaagcaaaaatgcccactttatgaagccaacggacaagctgttcctaaagagaaagatgaaatggtagagcaagagtttaaccggttgctagaagctacatcttaccttagtcatcaactagacttcaatgtcctcaataataagcctgtgtcccttggccaggcattggaagttgtcattcagttacaagagaagcatgtcaaagatgagcagattgaacattggaagaagatagtgaaaactcaggaagaattgaaagaacttcttaataagatggtaaatttgaaagagaaaattaaagaactccatcagcaatacaaagaagcatctgaagtaaagccacccagagatattactgccgagttcttagtgaaaagcaaacacagggatctgaccgccctatgcaaggaatatgatgaattagctgaaacacaaggaaagctagaagaaaaacttcaggagttggaagcgaatcccccaagtgatgtatatctctcatcaagagacagacaaatacttgattggcattttgcaaatcttgaatttgctaatgccacacctctctcaactctctcccttaagcactgggatcaggatgatgactttgagttcactggcagccacctgacagtaaggaatggctactcgtgtgtgcctgtggctttagcagaaggcctagacattaaactgaatacagcagtgcgacaggttcgctacacggcttcaggatgtgaagtgatagctgtgaatacccgctccacgagtcaaacctttatttataaatgcgacgcagttctctgtacccttcccctgggtgtgctgaagcagcagccaccagccgttcagtttgtgccacctctccctgagtggaaaacatctgcagtccaaaggatgggatttggcaaccttaacaaggtggtgttgtgttttgatcgggtgttctgggatccaagtgtcaatttgttcgggcatgttggcagtacgactgccagcaggggtgagctcttcctcttctggaacctctataaagctccaatactgttggcactagtggcaggagaagctgctggtatcatggaaaacataagtgacgatgtgattgttggccgatgcctggccattctcaaagggatttttggtagcagtgcagtacctcagcccaaagaaactgtggtgtctcgttggcgtgctgatccctgggctcggggctcttattcctatgttgctgcaggatcatctggaaatgactatgatttaatggctcagccaatcactcctggcccctcgattccaggtgccccacagccgattccacgactcttctttgcgggagaacatacgatccgtaactacccagccacagtgcatggtgctctgctgagtgggctgcgagaagcgggaagaattgcagaccagtttttgggggccatgtatacgctgcctcgccaggccacaccaggtgttcctgcacagcagtccccaagcatgtgagacagatgcattctaagggaagaggcccatgtgcctgtttctgccatgtaaggaaggctcttctagcaatactagatcccactgagaaaatccaccctggcatctgggctcctgatcagctgatggagctcctgatttgacaaaggagcttgcctcctttgaatgacctagagcacagggaggaacttgtccattagtttggaattgtgttcttcgtaaagactgaggcaagcaagtgctgtgaaataacatcatcttagtcccttggtgtgtggggtttttgttttttttttatattttgagaataaaacttcatataaaattg

SEQ ID NO: 72 - DNA, 6055 bp, Homo sapiens
  source 1..6055: mol_type = genomic DNA
actgagtcccgggaccccgggagagcggtcaatgtgtggtcgctgcgtttcctctgcctgcgccgggcatcacttgcgcgccgcagaaagtccgtctggcagcctggatatcctctcctaccggcacccgcagacgcccctgcagccgcggtcggcgcccgggctccctagccctgtgcgctcaactgtcctgcgctgcggggtgccgcgagttccacctccgcgcctccttctctagacaggcgctgggagaaagaaccggctcccgagttctgggcatttcgcccggctcgaggtgcaggatgcagagcaaggtgctgctggccgtcgccctgtggctctgcgtggagacccgggccgcctctgtgggtttgcctagtgtttctcttgatctgcccaggctcagcatacaaaaagacatacttacaattaaggctaatacaactcttcaaattacttgcaggggacagagggacttggactggctttggcccaataatcagagtggcagtgagcaaagggtggaggtgactgagtgcagcgatggcctcttctgtaagacactcacaattccaaaagtgatcggaaatgacactggagcctacaagtgcttctaccgggaaactgacttggcctcggtcatttatgtctatgttcaagattacagatctccatttattgcttctgttagtgaccaacatggagtcgtgtacattactgagaacaaaaacaaaactgtggtgattccatgtctcgggtccatttcaaatctcaacgtgtcactttgtgcaagatacccagaaaagagatttgttcctgatggtaacagaatttcctgggacagcaagaagggctttactattcccagctacatgatcagctatgctggcatggtcttctgtgaagcaaaaattaatgatgaaagttaccagtctattatgtacatagttgtcgttgtagggtataggatttatgatgtggttctgagtccgtctcatggaattgaactatctgttggagaaaagcttgtcttaaattgtacagcaagaactgaactaaatgtggggattgacttcaactgggaatacccttcttcgaagcatcagcataagaaacttgtaaaccgagacctaaaaacccagtctgggagtgagatgaagaaatttttgagcaccttaactatagatggtgtaacccggagtgaccaaggattgtacacctgtgcagcatccagtgggctgatgaccaagaagaacagcacatttgtcagggtccatgaaaaaccttttgttgcttttggaagtggcatggaatctctggtggaagccacggtgggggagcgtgtcagaatccctgcgaagtaccttggttacccacccccagaaataaaatggtataaaaatggaataccccttgagtccaatcacacaattaaagcggggcatgtactgacgattatggaagtgagtgaaagagacacaggaaattacactgtcatccttaccaatcccatttcaaaggagaagcagagccatgtggtctctctggttgtgtatgtcccaccccagattggtgagaaatctctaatctctcctgtggattcctaccagtacggcaccactcaaacgctgacatgtacggtctatgccattcctcccccgcatcacatccactggtattggcagttggaggaagagtgcgccaacgagcccagccaagctgtctcagtgacaaacccatacccttgtgaagaatggagaagtgtggaggacttccagggaggaaataaaattgaagttaataaaaatcaatttgctctaattgaaggaaaaaacaaaactgtaagtacccttgttatccaagcggcaaatgtgtcagctttgtacaaatgtgaagcggtcaacaaagtcgggagaggagagagggtgatctccttccacgtgaccaggggtcctgaaattactttgcaacctgacatgcagcccactgagcaggagagcgtgtctttgtggtgcactgcagacagatctacgtttgagaacctcacatggtacaagcttggcccacagcctctgccaatccatgtgggagagttgcccacacctgtttgcaagaacttggatactctttggaaattgaatgccaccatgttctctaatagcacaaatgacattttgatcatggagcttaagaatgcatccttgcaggaccaaggagactatgtctgccttgctcaagacaggaagaccaagaaaagacattgcgtggtcaggcagctcacagtcctagagcgtgtggcacccacgatcacaggaaacctggagaatcagacgacaagtattggggaaagcatcgaagtctcatgcacggcatctgggaatccccctccacagatcatgtggtttaaagataatgagacccttgtagaagactcaggcattgtattgaaggatgggaaccggaacctcactatccgcagagtgaggaaggaggacgaaggcctctacacctgccaggcatgcagtgttcttggctgtgcaaaagtggaggcatttttcataatagaaggtgcccaggaaaagacgaacttggaaatcattattctagtaggcacggcggtgattgccatgttcttctggctacttcttgtcatcatcctacggaccgttaagcgggccaatggaggggaactgaagacaggctacttgtccatcgtcatggatccagatgaactcccattggatgaacattgtgaacgactgccttatgatgccagcaaatgggaattccccagagaccggctgaagctaggtaagcctcttggccgtggtgcctttggccaagtgattgaagcagatgcctttggaattgacaagacagcaacttgcaggacagtagcagtcaaaatgttgaaagaaggagcaacacacagtgagcatcgagctctcatgtctgaactcaagatcctcattcatattggtcaccatctcaatgtggtcaaccttctaggtgcctgtaccaagccaggagggccactcatggtgattgtggaattctgcaaatttggaaacctgtccacttacctgaggagcaagagaaatgaatttgtcccctacaagaccaaaggggcacgattccgtcaagggaaagactacgttggagcaatccctgtggatctgaaacggcgcttggacagcatcaccagtagccagagctcagccagctctggatttgtggaggagaagtccctcagtgatgtagaagaagaggaagctcctgaagatctgtataaggacttcctgaccttggagcatctcatctgttacagcttccaagtggctaagggcatggagttcttggcatcgcgaaagtgtatccacagggacctggcggcacgaaatatcctcttatcggagaagaacgtggttaaaatctgtgactttggcttggcccgggatatttataaagatccagattatgtcagaaaaggagatgctcgcctccctttgaaatggatggccccagaaacaatttttgacagagtgtacacaatccagagtgacgtctggtcttttggtgttttgctgtgggaaatattttccttaggtgcttctccatatcctggggtaaagattgatgaagaattttgtaggcgattgaaagaaggaactagaatgagggcccctgattatactacaccagaaatgtaccagaccatgctggactgctggcacggggagcccagtcagagacccacgttttcagagttggtggaacatttgggaaatctcttgcaagctaatgctcagcaggatggcaaagactacattgttcttccgatatcagagactttgagcatggaagaggattctggactctctctgcctacctcacctgtttcctgtatggaggaggaggaagtatgtgaccccaaattccattatgacaacacagcaggaatcagtcagtatctgcagaacagtaagcgaaagagccggcctgtgagtgtaaaaacatttgaagatatcccgttagaagaaccagaagtaaaagtaatcccagatgacaaccagacggacagtggtatggttcttgcctcagaagagctgaaaactttggaagacagaaccaaattatctccatcttttggtggaatggtgcccagcaaaagcagggagtctgtggcatctgaaggctcaaaccagacaagcggctaccagtccggatatcactccgatgacacagacaccaccgtgtactccagtgaggaagcagaacttttaaagctgatagagattggagtgcaaaccggtagcacagcccagattctccagcctgactcggggaccacactgagctctcctcctgtttaaaaggaagcatccacacccccaactcctggacatcacatgagaggtgctgctcagattttcaagtgttgttctttccaccagcaggaagtagccgcatttgattttcatttcgacaacagaaaaaggacctcggactgcagggagccagtcttctaggcatatcctggaagaggcttgtgacccaagaatgtgtctgtgtcttctcccagtgttgacctgatcctctttttcattcatttaaaaagcatttatcatgccccctgctgcgggtctcaccatgggtttagaacaaagacgttcaagaaatggccccatcctcaaagaagtagcagtacctggggagctgacacttctgtaaaactagaagataaaccaggcaatgtaagtgttcgaggtgttgaagatgggaaggatttgcagggctgagtctatccaagaggctttgtttaggacgtgggtcccaagccaagccttaagtgtggaattcggattgatagaaaggaagactaacgttaccttgctttggagagtactggagcctgcaaatgcattgtgtttgctctggtggaggtgggcatggggtctgttctgaaatgtaaagggttcagacggggtttctggttttagaaggttgcgtgttcttcgagttgggctaaagtagagttcgttgtgctgtttctgactcctaatgagagttccttccagaccgttacgtgtctcctggccaagccccaggaaggaaatgatgcagctctggctccttgtctcccaggctgatcctttattcagaataccacaaagaaaggacattcagctcaaggctccctgccgtgttgaagagttctgactgcacaaaccagcttctggtttcttctggaatgaataccctcatatctgtcctgatgtgatatgtctgagactgaatgcgggaggttcaatgtgaagctgtgtgtggtgtcaaagtttcaggaaggattttacccttttgttcttccccctgtccccaacccactctcaccccgcaacccatcagtattttagttatttggcctctactccagtaaacctgattgggtttgttcactctctgaatgattattagccagacttcaaaattattttatagcccaaattataacatctattgtattatttagacttttaacatatagagctatttctactgatttttgcccttgttctgtcctttttttcaaaaaagaaaatgtgttttttgtttggtaccatagtgtgaaatgctgggaacaatgactataagacatgctatggcacatatatttatagtctgtttatgtagaaacaaatgtaatatattaaagccttatatataatgaactttgtactattcacattttgtatcagtattatgtagcataacaaaggtcataatgctttcagcaattgatgtcattttattaaagaacattgaaaaacttgaaggaatccctttgcaaggttgcattactgtacccatcatttctaaaatggaagagggggtggctgggcacagtggccgacacctaaaaacccagcactttggggggccaaggtgggaggatcgcttgagcccaggagttcaagaccagtctggccaacatggtcagattccatctcaaagaaaaaaggtaaaaataaaataaaatggagaagaaggaatcaga

SEQ ID NO: 73 - DNA, 1448 bp, Homo sapiens
  source 1..1448: mol_type = genomic DNA
gagtttgttcttacacacaagtttaatgccaccttcctctgtctgccatggaccaacaagcaatatatgctgagttaaacttacccacagactcaggcccagaaagttcttcaccttcatctcttcctcgggatgtctgtcagggttcaccttggcatcaatttgccctgaaacttagctgtgctgggattattctccttgtcttggttgttactgggttgagtgtttcagtgacatccttaatacagaaatcatcaatagaaaaatgcagtgtggacattcaacagagcaggaataaaacaacagagagaccgggtctcttaaactgcccaatatattggcagcaactccgagagaaatgcttgttattttctcacactgtcaacccttggaataacagtctagctgattgttccaccaaagaatccagcctgctgcttattcgagataaggatgaattgatacacacacagaacctgatacgtgacaaagcaattctgttttggattggattaaatttttcattatcagaaaagaactggaagtggataaacggctcttttttaaattctaatgacttagaaattagaggtgatgctaaagaaaacagctgtatttccatctcacagacatctgtgtattctgagtactgtagtacagaaatcagatggatctgccaaaaagaactaacacctgtgagaaataaagtgtatcctgactcttgactatgaatcccatctcaatttatttgcttcccattactgatctctgtacttgtagctgcacatactattggtactacctaatagtgccacatttagtggcacaaagtgaacaattctgagaattgacaactgttatgaatcttacagaagttcatgtttatcatattcattctattaaatgaggaaacagagacatagagaaaaacgtgcatcgttttaaagaaacagtgatattctatggtgaaggagtgaaggatgtccccgaatatgccagattggtatatgattgttttgtgtttaaaacagtggagaaattgtagattcagaaagggagagctgacctgtctcttcccgcacgcggcaagccgtgaagattcctctgggagggctatccgagtcatacaagggcaagaaaatagctcttatcgccagagacctggaattggatgctgcaatgaacctgaataaagatacttaataaacacctatctttcacctattttacagccccccgcaaccaatatatctcctagtgactcctctagaaaatttattgcccctagccagcttttcttcatcctgtcatttcttttcaaatttatcattcttggtctaaaaagcataaaagcatcttgcttaggccacttctatggatttcactctcttgcgagttcctcatgtacatgcaaaacgaataaaatgtgtatacttttattttgttca

SEQ ID NO: 74 - DNA, 1407 bp, Homo sapiens
  source 1..1407: mol_type = genomic DNA
gggcagtctgcgaagattgcaggcattgtttgttcttgtcttggatttatgcctttaaatttcaccttttattacacagctatagcaggcctttttatgagactaacctggcctctccactaaaggatgtgtgactttctggggacagaagagtacagtccctgacatcacacactgcagagatggataaccaaggagtaatctactcagacctgaatctgcccccaaacccaaagaggcagcaacgaaaacctaaaggcaataaaaactccattttagcaactgaacaggaaataacctatgcggaattaaaccttcaaaaagcttctcaggattttcaagggaatgacaaaacctatcactgcaaagatttaccatcagctccagagaagctcattgttgggatcctgggaattatctgtcttatcttaatggcctctgtggtaacgatagttgttattccctctacattaatacagaggcacaacaattcttccctgaatacaagaactcagaaagcacgtcattgtggccattgtcctgaggagtggattacatattccaacagttgttactacattggtaaggaaagaagaacttgggaagagagtttgctggcctgtacttcgaagaactccagtctgctttctatagataatgaagaagaaatgaaatttctgtccatcatttcaccatcctcatggattggtgtgtttcgtaacagcagtcatcatccatgggtgacaatgaatggtttggctttcaaacatgagataaaagactcagataatgctgaacttaactgtgcagtgctacaagtaaatcgacttaaatcagcccagtgtggatcttcaataatatatcattgtaagcataagctttagaggtaaagcgtttgcatttgcagtgcatcagataaattgtatatttcttaaaatagaaatatattatgattgcataaatcttaaaatgaattatgttatttgctctaataagaaaattctaaatcaattattgaaacaggatacacacaattactaaagtacagacatcctagcatttgtgtcgggctcattttgctcaacatggtatttgtggttttcagcctttctaaaagttgcatgttatgtgagtcagcttataggaagtaccaagaacagtcaaacccatggagacagaaagtagaatagtggttgccaatgtctgagggaggttgaaataggagatgacctctaactgatagaacgttactttgtgtcgtgatgaaaactttctaaatttcagtagtggtgatggttgtaactctgcgaatatactaaacatcattgatttttaatcattttaagtgcatgaaatgtatgctttgtacacgacacttcaataaagctatccagaaaaaaaaaaaaa

SEQ ID NO: 75 - DNA, 15549 bp, Homo sapiens
  source 1..15549: mol_type = genomic DNA
gttttgctcttgtcacccaggctggagtgcaatggtgcgatctcagctcatcaagttcaagagactctaatgcctcagcctcccaagtagcaggggttacagattctttaatctccagctcagcttcaacaattcaacgctgttctttctgaaaaagtacacatcgtgccttctctacttcgctcttggaacataatttctcatggcagtgtttaagaccactctgtggaggttaatttctgggaccttagggataatatgcctttcgttgatgtctacgttgggaattttgttgaaaaattcttttactaaactgagtattgagccagcatttactccaggacccaacatagaactccagaaagactctgactgctgttcttgccaagaaaaatgggttgggtaccggtgcaactgttacttcatttccagtgaacagaaaacttggaacgaaagtcggcatctctgtgcttctcagaaatccagcctgcttcagcttcaaaacacagatgaactggattttatgagctccagtcaacaattttactggattggactctcttacagtgaggagcacaccgcctggttgtgggagaatggctctgcactctcccagtatctatttccatcatttgaaacttttaatacaaagaactgcatagcgtataatccaaatggaaatgctttagatgaatcctgtgaagataaaaatcgttatatctgtaagcaacagctcatttaaatgtttcttggggcagagaaggtggagagtaaagacccaacattactaacaatgatacagttgcatgttatattattactaattgtctacttctggagtctataaaatgtttttaaacagtgtcatatacaattgtcatgtatgtgaaacaatgtgttttaaaattgatgaaattcgttcacctacatttgagaattataaaattaacataaagaattttgtattttcatttaatgtatatatttaatgttaaattcaatgtagttttattacacatttatgtaattttatttacattcttgctaattctcagcagaaatttaaataagatttaattcacatcaaataaaatttagaaaataaaatttaactcacactgcccaggctggagcatagtggcaagatcatagctcattgcaagctcaagtgatcctcctgactcagcctcccaagtagctaggactgcaggcaccatgtcactatgcccgactaatttttaatttttaattttttgtcaagacaaggtcttgctatgttgcccaggctggtcttgaactcctggcctcaagggattctcccaccttggattcccaaagtgctgggattataggtgtgaaccaccatccctggccctcttcacattcttgtatgaagattgatttgggaaaaatgcatttcaggtaactgacaaaagatataggatgaaaaataatatctttcaaatgtttaatttgaactaagagagcttatgcattgcactttctggagatttgtaatgttttggttttgttgtccatgtgactacaaaataatatattttttaattaaaaaatttaaaataatacaggcaagcatgtaatgattatcaatatttttttccaccaactatcctatacccctgacctcctttcattaggcattatcttctgttttgattttaacacttagagtggttttctctgttatgaatcaaagctgatctattttcatcatttttgtgatgaaaaaattaattttgattgacttaggatggaaggatttggactgggtgtggtggtttatgcctgtaatcgcagcactttgggaggccaaggcgggtggatcacttgaggtcaggagtttgagaccagcctggccaacatggtgaaaccctgtctctactaaaaatacaaaaattggctgggtgtggtagtgcacacctgtaatcccagctatttgggaggctgagtcgagaggatcgcttgaacctaggaggtggaggttgcagtgagtcgagattgcaccactgcactccagcctgggtgacagagccagactcctctccaaaaaaaaaaaaaaaaaaaaaagatgaaaggatttggaaccttaattgcatctgaaaaactgcctcacctttgttatttagtgtactccaaccacggagtaacatcccatcataatcccaaatcctactcaaacaaaaggggaagggattatgcaggtgtacactaggccactggtgtaccaattagaaaccactttagagttatgcctactgtacccacataatcctaaaaatatgttacaactgctacttcatagtttatgccacttattttattttttacttttattatttttttttctgagacacggtttcattcccattgcccaggctgtagtgcaatgatgcaatcatggttcactgcagcttcaacttcccaggctcaagggatcctcccacctcagccttctgagtacttgggactcaggtgcgagccatcatgctcagctaattttttgtatcatttgtagaaatggggttttgtattgttgcccaggctgatcttgaactcctggggtcaaggattctgcccgccttggcctcctaaagggctggaattacaggcataagccactgtgcccggccagtttatataatttaaacactgccttttggttccttgattcccatatgctaggacaagtaattattattttattttattttactttaagttctgggttacatgtgcagaacctgcaggtttgttacataggtatacatgttccaaggtggtttgctgcacctattgacccatcatctaggttttaagtcccacatgcattaggtatttgtcctaatgctcttcctccccttgccccccaccccccgacaggccttggtctgtgatgttcacctccctgtgtccatgtgttctcattgttcaactcccacttattagtaagaacatgtggtgtttggttttctgttcctgtgttagtttgctgagaatgatggtttccagcttcatccatgtcgctgcaaaggacatgaactcattctttttatggctgcatagtattccatggtgtatatgtgccatattttctttatccagtctatcactgatgggcatttgggttggttccaagtctttgctatggtaaatagtgctgcaataaacatacgtgtgcatgtgaggacaagtaattattttctgtttttctcaatacattaattattagttcctccgttagttgtgaagtcctaattagggaaaaggagttaggctggcgggagcagggaaaagcagaaagagaaagcagataagctatgagtctgcctttcttcatggtccaggatatgggccatgtgctaaactattaccagacacctgcaagttacctcaccgcaaccttggcattatcagtactggacaaagccctctgcagcatacagcataaacactattccataaaatcctaagcaagcctttgtttctttgcagtcagcttttcttctgctgatgctgcctgttgcctccctggaaacatattttcctacttttctttaataaatctgccttcctttacctacagctgtcttggtaaattcttttacctcaatgccaccggcccaggtagccgttgctcacccacaacattagtgtattagtccgttcttatgctgctactaaagatatacccaagactgggaaatttataaaataaagacatttaattgactcacagttctgcagggttggagaagcctcaggaaacttacagtaatgacagaagggaaagcaaacacatccctctacgcatggcagcagaaaggagacgtgctgagcaaaaggaaaaataccctcttattaaatcatcagatctagtgagaactcactcactatcatgagaacagcaaagaggtaactacccccatgattaaattacctcctaccagttccctcacatgatacgtgaggattaggggcactacaattcaagatgagatttgggtggggacacagccaagccatatcagttagtgacatctgtattctcatattgcatgcataagaaagtgagttattttacagctgaactgggacagctctttgcttatttccagagatgcctaggtgtctgtttttgactcttggccatgatatgggtagtaggctaactaactagctaacaaatggtttatggtgagttctttaaagttcaaaatccctcagtggaatccagggtcaatttgtttattgatagcttccatatgagataattacagatcttgtctctgctgtgtgaccagacacagataaaagactgcaagaaatttcagtttcagctctcatgaaaccaagtttcatctcacaaatatcaggtttcatccagagatgaatggtgtctttgcgcaaatatctcttggtcccacactgcttgtttgaattctctttctcatacggtatcatattcctttcacttattaaaaagtttttcatggctgggcgcggtggctcaagcctgtaatcccagcactttgggaggctgaggcgggtggatcacgaggtcaggagattgagaccatcctggctaacacggtgaaaccccgtgtgtactacaagtacaaaaaaattagccaggcgtggtgacaggcacctgtagtcccagctactcgggaggctgaggcaggagaatggcgagaacccgggagacggagtttacagtgagctgagatcgcgccactgcactccagcctgggtgacagaggagactccgtctccaaaaaaaaaaaaaaaaaaaaagcttttcataagtatgctcattagaaccttataattcatttcagttatctacacctggaaatgttagttctataattttggactttctgaaacttttctctttatatcctaacgcaggggttgaaaaacttttctcaaaaagctctatagcatatattttcaactttgtggaccagtctctgttgaaacttctcaaccttgccatggtggtgctaaagaagacataaataatacaaaaatgaatggtttgactgtgttacaaaagaattttattgacaaaacatatggtgagacagatttggtccacaggccatagtttgccaacatgtgcccaagtatgtaagatgagaatataaggccataaattctactctctgctttattcttttccaggtcacttcttaccagttgtaaatgtacttacaaattttgctatatgaaaacagttatgtctgttactatcaatctgtgttcattttaaagggtgacaatctacaaattatgtgttatagacaagttgcaagatgttcaccaatgattcccaccttgtgctatacatgccttggtggaatttctttccacattgtatcaaggttgctctgtgtgaccaatgaaataaagtggaaatgatgatatttcatttctgagaataggtcatcaaagatagtatgacttcctttttcctctctcccagattacttgatctggggaaaaccagttataatgtcatgagcagccctgttgaaaggaccatgcggcaaggaactgaagactcttacacacagccagcaaggaactgaagtctatttccaatagccatgctatgagccttctttgcttgtataggctccagtcttagtcaagccttcagatgattacagcccccagccaacaccttgacggcaacctcatgagagaccctgagctaggtccatcgtgctatgctgttcgaggattcctcactctcagaagctgtgtgaaatagtaaagtgtttattcttttttttttttttttttttgacagagtctcactctgtcacctgggctggagtgcagtggggccatgtcggctcactgcaacttctgcctcctggattcaagcaattctcctgcctcagcctcctgagcagctgggattacaggtgtgcaccaccactcctggctaatttttttgtatttttagtacagacggggtttcaccatgttggtcaggctggtcttgaactcctgacctcaggtgatctgcctacctcaccctcccaaagtgctgggattacaggcgtgagccactgcgcccagacataacttttattcttttaagtcactaaatattaacgtgtcacatagcaataatcaatacatattttggtaccaagaatgaagttactattataaagaaaaaaaaaaaccactaaaattttggagtgcttgaaaacaggcagtggatggaggccaaaaggacaggaaagactgaaaccttctagtatgggcttatagtagggaagtgaaaacatattagaaactggagaaagtaaaaatctttctatttagtaccagaaagtttagcaacacttttgtctgtagcattgtggaaagtagaaaatgtacttaatgatttaagagaatgctctaaacttatttccaactagagtgttgaatatcttgtctgatttcttcctactacttatattacaatgctatagaacacacataagctaatggaagggctgttgagcaaaagaagacagaacttgatagttttgagattcctggactctcaaatgttagcatgtcaaaaatgctaaaattgagaaatagattctgagcaaagatccaatctagagtgctctcaggaaagcatgattctaaacaagaaggtgtgggtgtgactgaaatttcctgtaaatatcatagaaagaacacaagtagtgcctcaattcagtcagatgaagatctataaaggtcaaataatagggcttctaggaagccccagggtattgtccctcaggtatctcagcagaagctccaggtagagagaagattgaagagatttatgtgtgcggtttttacaaatagagttcatagaaaacctcaaaacacttttgagatgactatgtcagtagaaaattgacaatgaattgctaccttttattcaaaagtaagaataattcaaaggacagaactaagagcctgtaaggtggatccaagagttatgaagagtgattttataagcagaaataggactgagtcctaatcaaatgagtcccgacatttgctatgctagattttaaattattatgcatcagtgactcctttgtaattctcatgcccctccctcttttgaacaaggatgtctatagtttgttctttcgaatgttgagtgtataagggaaggaaatctctagtattgttaatttcacaagccttcacatggagaaaaatgatactcaagaagctaaacttaaggaacttcacctgatgagtctcactcatacctggatgtgacaaatttcggactttgaactgacattgtaacggaatgagatttggcagttggtgtggattttgtatgtgggagggacataaatcatttggggccaaagattagactcttgtaaacagcttcctatatgctcccaatgatccctgtttcttggaatttaacccttttgatataatcaattacattgtataagggttgatcactgtgaccaagagaataaggcagaagttatcgcatatcacttttgaggctagattataaaagacagtatgtctttggcgttgccctttctcatatcatctgatttggtggaagccagctaccttgtcgtgagcaactcttttaagcgttccatgtggcaaagaactgaggcctcctataaacagctagcaaggaactgcagccatcttgtagacagccttgtgcacgagcctccttggttcaactcttcagccagtgtcaagccttagaaaatacaacccaacctacatttttactgcaacctcatgagggatcctgagctagaaccacctagcacagttgctcttgatttctgacctcagaaactgtgaagtgaaatattttgttgttttaagcttacgagtttgaggataatttgttctttatagtagttagctgatacaatatgcttcatcatcatgacctcatgaatagagaacatttatttatttattgagatggagtctcactctgtcacccaggctggagtgcagtggcacagtcttggctcactgcaacctctgcctcgctggttcaagcgattctcatgcctcagcctccccagtagctgggattacaggcacccaccaccatgcctggctaatttttgtattttcagtagacatgaggttttgccatgttggccaggctggtctccaactcctggcctcaagtgatccacctgcctcggcctcctgaagtgctgggattacaggcatgagccattgtgtctggccaaatagaggacattttagagcccaatagtaagctaggattatatttccttctttgaggttctattgttataacccttatacaataaaaaacaactcttctgccagattaaaattttttgttttttggtttttttagttctcaattatgttgtataacccatgagtgtcactttattctcattggaaatatcctcccaagagctcttacccacctgctgttgtttggactggcaccttactagacctgctccacaaactgccgtcatgaaatttttcttcactaattttctcatttacactaaatacttcattgattacagtttacctcttcatatattttaattgagcaaaaacacaataaagaatacctatcttaaatttactcgtaaacatttaagctatgtctacacttacacgattactaccagattgcaatagagactacctaccaccaccaagactctcttgctgtttgctaattgatactgtctcccctgttccaagaaaactgctactctgatttctgaaaatataggtttatttagcctgttctttaatttcatataaatggaagcttagcatgtatgatctttgtggcttctgttgctaagcattacgtctgtgagatacatccatatattcgtgcagcagtagctcctcacttttattgtcatgtagaattcataagaatgtatcacaatttgcttatttattctaatattgttcaacatttgagtcatttccacttttcactattatgagtaaaattgctataaacattttaatatagctcttgtgggacatgtggcttcatatcttttgagtgtacgcctaggagttgaatttctaagtcataagctgtcatatatttaggccctttagttcacgctttaaaaactagtgataatttattcataaagcttatttataatttcactggcagtttatgtgagtgttactctgtattcttgacaatacatagtattatgaattattttagtctaaggaccttctggatactatgcatttgcatacaattgtacatttaatttccatcttccaaatgaataatgatgcttatccctcatctttttttttcatttttatatccccttctatgtagtgcttgtttaagcttttagccattatttatttttaacagcgctgttgcagtataattgagatactttaagcatactttatatgcttaaagtatgacatttgatgtatttccatatctatgcatctgtgaaaccatcacctcagcaatatataaaacacctactaacctcaaaagtatcctttcccctatgtataaaatacttcctcttgctcctcccctcacagatgaatattctgttactatagatttgcctttctatgttttatatagatagaatcatataatatgtacatctgtgttctagatttttcattcagcatcataatagtttttatactcatctatgttgatacatgtatcaatagttaattcccttttatttcttatttctttcctttttttttttttttgagactgagtattgctctgtcacccagattagagtgcagtggtgtgatctcagctcactgcaaccttcaccacctgggttcaagttattctcatgcctcagcctccccagtagccgagattacagatgcccaccaccacgcccagctaatttttgtatttttagtagagacggggtttcaccatgttgaccagtcttgtcttgaactcctgacctcaactgctccacctgccttgacctcccaaagtgctggaattacaggcgtgagccaccacatccagccgattcctttttacttctgagagtcttctgatccttgagtaaagtatgtttcttgtacctcaatatgcttaattttttccttctggctttcgttttaggttcagggtatatatgtaggcttcttatatgagtacattgcatgttgcagtggtttggtgtacagataattttgtcatcctggtaatcagcatagtacctgacaggcagtttttctatcctcatccttctccctctcccccccaagtaggccccagtgtctattgtttcctttttttgtgtgcctgtgtactccatggttagctcccacttataagggagaatatgtggtttttggttttctgttcttccattgatttgcttaggataatggcctctagttctatccatgttcctgcaaaggacatgatttttttcttttttatgtctgcatagtattccatggtgtatatgtaccacattttctttacctagtccattgtctcaatatacttaagttatactcagtaatgttttgtagtttttaatattcaggccttttatgtttttatgagatttccccaaagtagtctattgtttttaaagctattatacattttattttctaatttcaaatgttttattttaaaattgtaagtatatatgtatatgtgtgtgtgtgtatatatatatatatatatatatattcatttacacagttgattctaagtgtatcttttattgtttaacctgcctaaattcacttatcctagcagcatttctgtagatttcattgggttatctgcatagatgaataaagacagtttttacctctttcttttgaaaactgtgtgcctttaattctttttatcaccttgtcacagtggccagaatattcaacacaaagttgaatacaagtggtgagtaaacacccttgttttgctattgatcttagagcatgaatattcactttttttacctttatacttaattttagctgtaggattttcataaatgacctttactaggttgagaaagttccctcctattcctagtctgatgagaatttttataaggagtacatatgacatatgcttttattaaatgttttattctgcctcgattgaaatcagatagtttttatttcccagttataaacctcagttgttcatgttatcttttttacgtatctttgcagatgctttgctaattttttaaaattttattttattgaggtaaatacaacataagatctatcctcttaacaaattttcaagtctacagtacagtattattaacaataggtacaatgttgtatagtagatctctataatttattcatcttgcataattgaggctttatgccctttgattaacgacgtcccattttttcctctctccattcctggcaaccaccattctattctctgattttataagcttgaccactttagatatttcacgtaagtggaatcatatagtatttatcctgtgacttgtttatttcatttagcataatgtcctcaagtttcatccacattgttacatattgcaggatttcatttttaaggctggataatattctattgtatgtgtatgtacacattggctactgtgactagtatagcaatggacagtagtatactaatatttctttgagattcttatttcaattcttttgcataattacccagaaaggggattggtggatcatatggtagttctatttttaattttttgagaaatcaccatcctgttttccacagaagcagcacaatttttcattcccaccaaagtgttcaaggggtctaattaccccacgtacttctcaacacttgtctttcatttgtttgataatagccatccttataagtgagagatgatatttggtggttataatttgcatttccctgatgattagtgatattgagcatcatttcatatgcccattgaccctttgtatgttttttatgaagaaatgaccattcaagtctttgatacattttttaattgggttacttgtgttttttttaatattgagttgtaggagttctttatatgttttggatattgactccttttctgatatatgatttgcaattattttctcccattctgtagatcatcctttcattccattggttatttcctttgtgaaccctgaaaatttgagacaggtctcagttaatttagaaagtttattttgcaaaggttgagaacatatgcccataacacagcctcacctcaggaggtcctgctgacatgtgcccaaggtggtcagggcacagtttggttttatacattttagggagacatgagacatcaatcaacatatgtaaaatgaacagtggtttggtctagaaaggtgggacaattcaaagcagaagtgaaacaactggaagcaaggagggggcttccaggtcacaggtaagagacaaatggttgcacctttttgtttctgattagcctttccaaaggaggcaatcagatatgcatttatctcagtgagcaaagagatgactttgaatagaatggggggctcccaggtcacaggtaagggacaaatggttgcatctttttgtttctgattagcctttccaaaggaggcaatcagatacgtatttatctcagtgagcaaagagatgactttgaatagaatgggaggcagttttgccctaagcagttcccagcttgaattttcccttttgttgagtgattttgggggcccaagatattttcctttcacacctttgatgcgaacaagctgtttgtttgctatagtcctacttgtctattcttgcttttgttgcctgtgcttttggtgtcagattgatgatatcattgccaaaaccaatgtcaaaaggttttcctctatgttttctttgaagggctttacattttcagtacttacatttaggcttttaatccatttgaaatttatttttgcatatggtgtaagataagcaatttctttgcaatatggatgttcatttttcccgtcactgtttgttgaagaaactgtcatttccccttaaatagtcctgccacccaaagaccgtttaaccatatttgcaaagtttattcccaagttctccaatctgtttaattggtctatatgttcatctttatgccagtgccatattgtttcaattattgtagctttgtaatatattttgatatcaggaagtttgaggcctctggccttctgtttcttgctcaagatttgtttggctattcagggctttttgtggttccatgtatattttagtatcattgttttcctaattctaaaatgccattgaggtcttgataggtattgcactaaatctgcagatcacattgtgaaatacaaatattttaactatatgaagtcttttaataaatgaatataggaggatttttgcatgttgattttgtaccctgcaactttacttggttttaggaggcttttttgtggattctttagagcatgccataggcaaacagggaccattgtacttcttcttttacaatctgtatgttgttaatttcttttccttgcctaagagctttaagtaggacaagggttaaatagaaatggcaagtgcaaacatccttgccatgtttctgatgtcagaggaaaagttcagctttttccatagcatgatattagctatgcactttacatatagggccttcaaaatgttgaaatatttttctcaaattctaggttggcaggagttatcatcataaaatgggtattaaattttgtgaaaactttttttctgaatctattgagatgcacaggtgacatttatccttcattctattaatgtggtatattacattaattgattttgtatgttaggctatccttgcaccccagggataaatgccacttgcttatggcatatactccttttagtgtactgttgaattaattttgctactactttgttgaggatttttgcatctacgtttactagacatattggcttatagttttcttgtggtatctttgacaagctttggtgtaatggtaatgctggccacataaaattagtttgaaagtatttattctttttaaatttttatataatagcttgggaaagatggccattaatttctccttaaatatttggtggcttcaccagaagagccatcttgtcctgggaatttttttgttgtaagtttcttgattactgattcaatcttcattctagttatagatacgctcatattttctatttcttcataattcagtcttggtaggtccttgtctttgtgaattttttcatttcttctaggttatccaatttgttggcctataattgttcttagttgtctcttaccatcttttatatttctgtggcatcagttgcaatgtcttatttctgatttcatttatttaaggcctctcttctttttcttagtctagctaaaggtttgtcaagttatttatattttccaaaaactaactcttagttttgtttactttttatatatcctttccattcactattttatttctgaactaatctttattattttctttattcttctaaatttgaactttgtttgttcttttctacatttctagttgcttgggatatgtattagtccattttcacactgttgataaagacttaactgagagactgggtaatttgtaaagaaaaagaggtttaatggactcacagttccacgtggctggggaggcctcactatcatggcagaaggtaaaacacatgtctcacatggcggcagacaagagagaatgaaagccaagccaaagggggtttccccttataaaaccatctgatttcataagactgattcactaccatgagaacagtatgggggaaaccacccccatgattcaattatctcccactgggtccctccaccaacatgggggaattatgggagctacaattcaagatgagatttgggtggggacacagccaaaccatatcaaggtataaagtgcattgtttgagacctttcttttttcttaatgcagatattcatcactataaacttttcttttagccctacttttactacatcccataagttttgttagactttatttttgttttcatttattctaatgtgtttttaaatttcccttttgatttattctttgcagattggttgttcaaaaatgtattgttaaattatcacatatttattagttttccttttgcaactgatttctagtttcattcccttgatgctgtaaaagatacttgatatgacttcaattttcttaattttcttaagacttcttttatgacctaacatatgatctatcctgcagaatgatccatgtgcacttgagaagaatgtatactctgctgctgttggatggaatgttctgcacatgtctgtaggtgacttgacttgcagtgttgatcaggtcatctgggtctttgttgcctttatgtttggttgttctatccattattaaaagtgagcactg

SEQ ID NO: 76 - DNA, 1974 bp, Homo sapiens
  source 1..1974: mol_type = genomic DNA
agagaccagcagaacggcatcccagccacgacggccactttgctctgtctgctctccgccacggccctgctctgttccctgggacacccccgcccccacctcctcaggctgcctgatctgcccagctttccagctttcctctggattccggcctctggtcatccctccccaccctctctccaaggccctctcctggtctcccttcttctagaaccccttcctccacctccctctctgcagaacttctcctttaccccccaccccccaccactgccccctttccttttctgacctccttttggagggctcagcgctgcccagaccataggagagatgtgggaggctcagttcctgggcttgctgtttctgcagccgctttgggtggctccagtgaagcctctccagccaggggctgaggtcccggtggtgtgggcccaggagggggctcctgcccagctcccctgcagccccacaatccccctccaggatctcagccttctgcgaagagcaggggtcacttggcagcatcagccagacagtggcccgcccgctgccgcccccggccatcccctggcccccggccctcacccggcggcgccctcctcctgggggcccaggccccgccgctacacggtgctgagcgtgggtcccggaggcctgcgcagcgggaggctgcccctgcagccccgcgtccagctggatgagcgcggccggcagcgcggggacttctcgctatggctgcgcccagcccggcgcgcggacgccggcgagtaccgcgccgcggtgcacctcagggaccgcgccctctcctgccgcctccgtctgcgcctgggccaggcctcgatgactgccagccccccaggatctctcagagcctccgactgggtcattttgaactgctccttcagccgccctgaccgcccagcctctgtgcattggttccggaaccggggccagggccgagtccctgtccgggagtccccccatcaccacttagcggaaagcttcctcttcctgccccaagtcagccccatggactctgggccctggggctgcatcctcacctacagagatggcttcaacgtctccatcatgtataacctcactgttctgggtctggagcccccaactcccttgacagtgtacgctggagcaggttccagggtggggctgccctgccgcctgcctgctggtgtggggacccggtctttcctcactgccaagtggactcctcctgggggaggccctgacctcctggtgactggagacaatggcgactttacccttcgactagaggatgtgagccaggcccaggctgggacctacacctgccatatccatctgcaggaacagcagctcaatgccactgtcacattggcaatcatcacagtgactcccaaatcctttgggtcacctggatccctggggaagctgctttgtgaggtgactccagtatctggacaagaacgctttgtgtggagctctctggacaccccatcccagaggagtttctcaggaccttggctggaggcacaggaggcccagctcctttcccagccttggcaatgccagctgtaccagggggagaggcttcttggagcagcagtgtacttcacagagctgtctagcccaggtgcccaacgctctgggagagccccaggtgccctcccagcaggccacctcctgctgtttctcatccttggtgtcctttctctgctccttttggtgactggagcctttggctttcacctttggagaagacagtggcgaccaagacgattttctgccttagagcaagggattcaccctccgcaggctcagagcaagatagaggagctggagcaagaaccggagccggagccggagccggaaccggagcccgagcccgagcccgagccggagcagctctgacctggagctgaggcagccagcagatctcagcagcccagtccaaataaactccctgtcagcagc

SEQ ID NO: 77 - DNA, 2421 bp, Homo sapiens
  source 1..2421: mol_type = genomic DNA
gaagagaccatatttgttcgcagaggaagccgttgctttctgggatctggctacgccagaaaagacatcggctccaacaggggtgttccacagggtagctgggagttggaagagccaagaacgcctccgagctctggatttgagcttctctgcccatgggtgaagcgcccatgctcagcttgtgagcttcttcccgggagagcagccatggcactgaggaatgtgccctttcgctcagaggtcctgggctgggaccccgacagccttgctgactatttcaagaagctcaactataaggactgtgagaaggcagtgaagaagtaccacatcgatggggctcgcttcttgaacctgacagaaaatgacatccagaagttccccaagctccgggtgccgattctcagtaagttaagtcaggaaatcaacaagaacgaagagaggaggagcatcttcacacgcaaaccccaagtcccgcggtttcctgaagagacagaaagccacgaagaggacaatgggggctggtcgtcctttgaagaagacgattatgaaagtcccaatgatgaccaggatggggaggatgatggagactatgagtcccccaatgaggaggaagaggcacccgtggaagatgacgcggattatgagccgccaccctccaatgacgaggaagctctgcagaactccatcctgcctgccaagcctttccccaactccaactccatgtacatcgaccggcccccctctgggaaaaccccccagcagcctcctgtgcccccccagagaccgatggccgccctcccgcccccaccagccggccggaatcactcgccactgcccccaccccagaccaaccacgaagaacccagcagaagcagaaaccacaaaacggcaaagctccctgctccttcaatagacagaagcacgaaacctcccctagatcgttcattagctccgtttgatagagaacccttcacactaggaaagaaaccaccattttctgacaagccctcgattccagcgggaaggtcactcggggagcatttacccaagattcaaaagcctcctttaccaccgaccacggaaagacatgaaaggagcagccccctgccagggaagaagccacctgtgccaaagcatggatggggaccagacagaagagagaatgtaagtacaaaattgcatcagagacctttgccccagccagcactacttcctatgagctccaacactttcccttcaagatctactaagccaagtcccatgaaccctctcccatcctctcacatgcctggagcattctcagaaagtaacagcagttttccacagagtgcctccctgccaccatacttctctcaaggccctagcaacagaccacctatcagagccgaaggcagaaacttccccttgccacttccaaacaaacctcggcccccatcccccgcggaggaagagaattcattaaatgaagagtggtacgtttcttatattacccgaccagaggcagaagctgctcttagaaagataaaccaggatggcacatttctggtcagagacagctctaaaaaaacaacaaccaatccatatgtcctcatggtgttgtacaaagataaagtttacaacatccagatccgttatcagaaggaaagtcaagtttacttgttgggaactggactccgagggaaagaggactttctgtctgtgtcagatattattgactacttcaggaaaatgccacttctgctcattgatgggaaaaaccgaggttccagataccagtgcacattaacgcatgctgcagggtacccatagcaagttatagccgagcaaatgaaccgtcctcctgcctctgttgccaacacgagatcaatcagccttggtcaatggacaaacacttaggactgaactgaacccctccccatgaacacaagggttttatcctttcctttaaaaacagtgtttgaaatgaagactgtcaactatcccataatttatttattcttcttcaatgtttgtaaagtgcatgagtcatgttcacacttgaagtctagtagtgcactgtaataattcattttttaaaagattatttaatgcccatttcaaaatacagtagtttacacagctacagaaacaatttggggcaagttttaaaacactgaaacagtaatagttattggtgtcacataaaactgatttgttttttacagccaaacctctgtcagtcagaggcattcattagttttatacatgtaatttgaaaatcactaaacctcgttttctcagcagcaataatttaagaggcttcaaaaatataatttcactcttatttagtattttttcctgggggcatttttacgtaatttttttatgaaaagacaaatgcatgttgagataacttctgggattaaaatagtcttttgcttt

SEQ ID NO: 78 - DNA, 3068 bp, Homo sapiens
  source 1..3068: mol_type = genomic DNA
aagatctaaaacggacatctccagcgtgggtggctcctttttctttttctttttttcccacccttcaggaagtggacgtttcgttatcttctgatccttgcaccttcttttggggcaaacggggcccttctgcccagatcccctctcttttctcggaaaacaaactactaagtcggcatccggggtaactacagtggagagggtttccgcggagacgcgccgccggaccctcctctgcactttggggaggcgtgctccctccagaaccggcgttctccgcgcgcaaatcccggcgacgcggggtcgcggggtggccgccggggcagcctcgtctagcgcgcgccgcgcagacgcccccggagtcgccagctaccgcagccctcgccgcccagtgcccttcggcctcgggggcgggcgcctgcgtcggtctccgcgaagcgggaaagcgcggcggccgccgggattcgggcgccgcggcagctgctccggctgccggccggcggccccgcgctcgcccgccccgcttccgcccgctgtcctgctgcacgaacccttccaactctcctttcctcccccacccttgagttacccctctgtctttcctgctgttgcgcgggtgctcccacagcggagcggagattacagagccgccgggatgccccaactctccggaggaggtggcggcggcgggggggacccggaactctgcgccacggacgagatgatccccttcaaggacgagggcgatcctcagaaggaaaagatcttcgccgagatcagtcatcccgaagaggaaggcgatttagctgacatcaagtcttccttggtgaacgagtctgaaatcatcccggccagcaacggacacgaggtggccagacaagcacaaacctctcaggagccctaccacgacaaggccagagaacaccccgatgacggaaagcatccagatggaggcctctacaacaagggaccctcctactcgagttattccgggtacataatgatgccaaatatgaataacgacccatacatgtcaaatggatctctttctccacccatcccgagaacatcaaataaagtgcccgtggtgcagccatcccatgcggtccatcctctcacccccctcatcacttacagtgacgagcacttttctccaggatcacacccgtcacacatcccatcagatgtcaactccaaacaaggcatgtccagacatcctccagctcctgatatccctactttttatcccttgtctccgggtggtgttggacagatcaccccacctcttggctggcaaggtcagcctgtatatcccatcacgggtggattcaggcaaccctacccatcctcactgtcagtcgacacttccatgtccaggttttcccatcatatgattcccggtcctcctggtccccacacaactggcatccctcatccagctattgtaacacctcaggtcaaacaggaacatccccacactgacagtgacctaatgcacgtgaagcctcagcatgaacagagaaaggagcaggagccaaaaagacctcacattaagaagcctctgaatgcttttatgttatacatgaaagaaatgagagcgaatgtcgttgctgagtgtactctaaaagaaagtgcagctatcaaccagattcttggcagaaggtggcatgccctctcccgtgaagagcaggctaaatattatgaattagcacggaaagaaagacagctacatatgcagctttatccaggctggtctgcaagagacaattatggtaagaaaaagaagaggaagagagagaaactacaggaatctgcatcaggtacaggtccaagaatgacagctgcctacatctgaaacatggtggaaaacgaagctcattcccaacgtgcaaagccaaggcagcgaccccaggacctcttctggagatggaagcttgttgaaaacccagactgtctccacggcctgcccagtcgaccccaaaggaacactgacatcaattttaccctgaggtcactgctagagacgctgatccataaagacaatcactgccaacccctctttcgtctactgcaagagccaagttccaaaataaagcataaaaaggttttttaaaaggaaatgtaaaagcacatgagaatgctagcaggctgtggggcagctgagcagcttttctcccctcatatctgcgtgcacttcccagagcatcttgcatccaaacctgtaacctttcggcaaggacggtaacttggctgcatttgcctgtcatgcgcaactggagccagcaaccagcacatccatcagcaccccagtggaggagttcatggaagagttccctctttgtttctgcttcatttttctttcttttcttttctcctaaagcttttatttaacagtgcaaaaggatcgtttttttttgcttttttaaacttgaatttttttaatttacactttttagttttaattttcttgtatattttgctagctatgagcttttaaataaaattgaaagttctggaaaagtttgaaataatgacataaaaagaagccttctttttctgagacagcttgtctggtaagtggcttctctgtgaattgcctgtaacacatagtggcttctccgcccttgtaaggtgttcagtagagctaaataaatgtaatagccaaacccactctgttggtagcaattggcagccctatttcagtttattttttcttctgttttcttcttttctttttttaaacagtaaaccttaacagatgcgttcagcagactggtttgcagtgaattttcatttctttccttatcacccccttgttgtaaaaagcccagcacttgaattgttattactttaaatgttctgtatttgtatctgtttttattagccaattagtgggattttatgccagttgttaaaatgagcattgatgtacccattttttaaaaaagcaaggcacagcctttgcccaaaactgtcatcctaacgtttgtcattccagtttgagttaatgtgctgagcatttttttaaaagaagctttgtaataaaacatttttaaaaattgtcattt

SEQ ID NO: 79 - DNA, 1422 bp, Homo sapiens
  source 1..1422: mol_type = genomic DNA
ccaggggctccgcacagcaggtgaggctctcctgccccatctccttgggctgcccgtgcttcgtgctttggactaccgcccagcagtgtcctgccctctgcctgggcctcggtccctcctgcacctgctgcctggatccccggcctgcctgggcctgggccttggttctccccatgacaccacctgaacgtctcttcctcccaagggtgtgtggcaccaccctacacctcctccttctggggctgctgctggttctgctgcctggggcccaggggctccctggtgttggcctcacaccttcagctgcccagactgcccgtcagcaccccaagatgcatcttgcccacagcaccctcaaacctgctgctcacctcattggagaccccagcaagcagaactcactgctctggagagcaaacacggaccgtgccttcctccaggatggtttctccttgagcaacaattctctcctggtccccaccagtggcatctacttcgtctactcccaggtggtcttctctgggaaagcctactctcccaaggccacctcctccccactctacctggcccatgaggtccagctcttctcctcccagtaccccttccatgtgcctctcctcagctcccagaagatggtgtatccagggctgcaggaaccctggctgcactcgatgtaccacggggctgcgttccagctcacccagggagaccagctatccacccacacagatggcatcccccacctagtcctcagccctagtactgtcttctttggagccttcgctctgtagaacttggaaaaatccagaaagaaaaaataattgatttcaagaccttctccccattctgcctccattctgaccatttcaggggtcgtcaccacctctcctttggccattccaacagctcaagtcttccctgatcaagtcaccggagctttcaaagaaggaattctaggcatcccaggggaccacacctccctgaaccatccctgatgtctgtctggctgaggatttcaagcctgcctaggaattcccagcccaaagctgttggtctgtcccaccagctaggtggggcctagatccacacacagaggaagagcaggcacatggaggagcttgggggatgactagaggcagggaggggactatttatgaaggcaaaaaaattaaattatttatttatggaggatggagagaggggaataatagaagaacatccaaggagaaacagagacaggcccaagagatgaagagtgagagggcatgcgcacaaggctgaccaagagagaaagaagtaggcatgagggatcacagggccccagaaggcagggaaaggctctgaaagccagctgccgaccagagccccacacggaggcatctgcaccctcgatgaagcccaataaacctcttttctctgaaa

SEQ ID NO: 80 - DNA, 5965 bp, Homo sapiens
  source 1..5965: mol_type = genomic DNA
ctcaagctaggctgagctgtgcctacgtcggcctcgactcccgggggctggaggagttacctttggagcccgaaaggaggaaggaagcaaaatatcaacaacagccgaggcggctcaggcgctcggccccggttccccgcttgcctgccgcccgcctgctggcccccgcgcccacgacgggggcccaggcctcacggcgccgcccagggcccgcgcggacgccggcctcatttattattctccccgcccggagctgcggcttcccggtgttgaagatcccccggaccaggggcgagggctacccgctctttgccgtgacaacaccgttcccccagccgggctggaggctgtgcagaaggtatcctgcagaccatgaactgagcactgttcccagaccgttcatgagcacagtgtaaggtgtgccgagacccaccacccagcgagcccctcccctccgtagcactgaggacccccggagaagatggggaggaaaaagattcagatccagcgaatcaccgacgagcggaaccgacaggtgactttcaccaagcggaagtttggcctgatgaagaaggcgtatgagctgagcgtgctatgtgactgcgagatcgcactcatcatcttcaaccactccaacaagctgttccagtacgccagcaccgacatggacaaggtgctgctcaagtacacggagtacaatgagccacacgagagccgcaccaacgccgacatcatcgagaccctgaggaagaagggcttcaacggctgcgacagccccgagcccgacggggaggactcgctggaacagagccccctgctggaggacaagtaccgacgcgccagcgaggagctcgacgggctcttccggcgctatgggtcaactgtcccggcccccaactttgccatgcctgtcacggtgcccgtgtccaatcagagctcactgcagttcagcaatcccagcggctccctggtcaccccttccctggtgacatcatccctcacggacccgcggctcctgtccccccagcagccagcactacagaggaacagtgtgtctcctggcctgccccagcggccagctagtgcgggggccatgctggggggtgacctgaacagtgctaacggagcctgccccagccctgttgggaatggctacgtcagtgctcgggcttcccctggcctcctccctgtggccaatggcaacagcctaaacaaggtcatccctgccaagtctccacccccacctacccacagcacccagcttggagcccccagccgcaagcccgacctgcgagtcatcacttcccaggcaggaaaggggttaatgcatcacttgactgaggaccatttagatctgaacaatgcccagcgccttggggtctcccagtctactcattcgctcaccaccccagtggtttctgtggcaacgccgagtttactcagccagggcctccccttctcttccatgcccactgcctacaacacagattaccagttgaccagtgcagagctctcctccttaccagcctttagttcacctggggggctgtcgctaggcaatgtcactgcctggcaacagccacagcagccccagcagccgcagcagccacagcctccacagcagcagccaccgcagccacagcagccacagccacagcagcctcagcagccgcaacagccacctcagcaacagtcccacctggtccctgtatctctcagcaacctcatcccgggcagccccctgccccacgtgggtgctgccctcacagtcaccacccacccccacatcagcatcaagtcagaaccggtgtccccaagccgtgagcgcagccctgcgcctccccctccagctgtgttcccagctgcccgccctgagcctggcgatggtctcagcagcccagccgggggatcctatgagacgggagaccgggatgacggacggggggacttcgggcccacactgggcctgctgcgcccagccccagagcctgaggctgagggctcagctgtgaagaggatgcggcttgatacctggacattaaagtgacgattcccactcccctcctctcagcctccctgatgaagagttgacaatctcaccgcccgcccttccctgccccgggctcctcccgctcgacccccacttcctttcttgtgcttcgtgtcctgttgacggttacatttgtgtataattattatattattattattattattatattttttttaatttggattctcgctttggagagggggatgctctcatcccctctttctgtaccccccaccattttcactggctggggggctctctttttcgcgggaaggggggacactttgcacgttgtacacatatgctgcaggaagggggtggggggcccaataaggcctttgggaaaggacaggtgccgagccctgcatgtggagccctcccaccccacccccagatagagggaaataaccaaaaaactaccaaacaacagaaacccacactctagactgaaaccccaaagtgggcttgatgggtgggtttgtgtttcaaggggaaagtgaggcagaggttctgaaaagggtctctgtttttgtgttcatgtagccataggcacatggagcagaatacttaagcctggcccccaaatgcccctgcacacacacgtgccacacctgcgctgattcttgtgtgtgctgcacccccaaggtgtgtgggtgctggctgagctttgggccgggaaggcagcctgggaatctgaggctggagacaggggtttgaggtgggggcctctctggaagcacatttggagggaaagacaagagagccatgaggagagggctgaggagggcagaagggctaggcagggggcaaattgagcccctcccttccccagtttttctctaagatatacagtgcaatagctccccacccctcagttgacgccagccctgtaaagctggccacagtgtgcagggagaatggggagagggtcttcagtgaggtggctggggcgagagtcggcctggacttccctggggtgctccaggccagagctctttcattggggcgagtgtggtgaggggacgtccttggtcttgcacgcacactacctgggggagtcaacactgggatggtctgtggggtgggagggcctacggatgggtccgtagaggtcccacctccctcattcctccttggcccctctccctagcttctcctgttagctccttctgctcctgaccccacctccttgctcttggcgcccctattgtctctggctacctccttgtcccaccacctccaggctgcatcccaccttccctcttggctactgtaattgtaaatagcgacctttggaaaacgttagcggtgtaacagtccaggaaactgtttttttttgttgttgttgtattgatatgaaatgagattctatttttgtcaaagtatattgtaataataatgactcaaacggcccgtactgtacagacgagattcttctgctgttgttcttgctcccctcccctcctctgagtccgcccctccctgctgcctcctcagtggggcagtgggcaaggggcccaggggcagccgaagcacggggtcctgagacctcaggcaggattggagatcaaaccagagggggcaggcccccagcctgctctctaggatcaccccccgccctaaggggcctggcctggggtgacgtggccaggcagactgtctgccccactccttcacacaagcccagctcctctgcccaaggggtgcggcgcccccttggggtttcctcccagttggagagtagagttaagacaaggcccagttttgtgttagccgaccgtctttgcccacctctatgacccagcctcttgcagtattcccatacttgatgcagggaaggaaccagaagcagaggggcctctacgcaggtacacacgtgtacctgagtgtgttcatgagggcatctggtgtttatgtgtctgagtgtagctttgtatttatgtgtgtgtgtgtgtgtatgtctgattgcacgggtgtacttttgtatttatgtgtgtgtgtggttgcacgggtgtgcctctgtgtgtctctgaccctggctgggtgtgtgtgcaaatctgtgtgactggagctctaggggcatctctgtgtctgagtgtgcctggtgtgtgtttacaaagggagagttggctgctccagctccacagccctgggaccccaactcctgtcttccctgctcctttccctgtgttcaccctcagctctgacacattgaactgcagttggggggattggcagttagccctctgtgcttctccctgcagccctacctctgccaaggtctctccctccagggacctctgcttccacccacatatgtccacttagtcacccacacttgacacagttcctggagtaccctcttcccccaaccccagacctgctttcagagcaaaactcaagtccctcttcctccgtgaagcttctccctcagctgagcagtgatcacttactcactcttaaccccaatccgctgactgggtggggacagcacgtccagccttcccacctctcctgcaggcttctagacggagtttcaaaaactgatgagcctcgatccagggcttgaaagaagccagggtgtaatcttgttcatgcatgcgtccccagagcctcgcccagtgcctggcacatagtaggcactcaataaatgctgaatgggtgaatagttgaatgataggtgctcaataaatgaatgaatggccttcccttctcaggctattcccaccattagtctgcccacctttctaggctgggcttggccaccattaaacacggggtgggggtgagggcccctgcaattcacggtgcaatattcaccagttttgccctctgcctcataaaggcaaacctggcttttgattaccatgtgtggatgtttcagtgtcctttcttctctgtccctggggatggggtggtctgtgaatatgtgacatttctgcagttcagtatccgaaggtttctcttgggggtaggggctcctgggcggccagatgaatgggtccctgggaacccagacctcagatgaggacttaatgtcttcttcctctcaagccaaattcgcctccacccactccctctgaagaactgggcatttgccaaagtaaccactggagtcatctaatggccctccccctccccaggtttcccacagctttcagggacagtgggcaagaggacacccccccccaccacctcagtggaacacaccattctccccccctcaacagcacactcagtgcagcaagactgacccctgaccccctcccagccctccctaccttggacaggaaggaagtaatgcaccttctcttgctgattatttatttgtttggagagacagaaatgtaaaagtgtatctagaaatatctatatctctatatatttttaactgactctttggaatcccctggggtggggtgaggggtaagtttaggctttcgcggaggggaggagacatggagcctgggaactccttgttctcccctctgctgcctctccccaccccttaaagcagttggtagaaggaatggtatttgtatggggggagggaggctggaatggagaatctggattctctcctcttccccattctccagagggagggaggtggtgaggaagaggaagggaggggcaggatgggccatggaggtgccccacccccacacctgacaatcacccacactcctggggctcttcctgggtcctggggcagggcgagtccaagtgtgaggctgttgatttgttttcaatatttcttttcgtgctgtatggtgatgctttcttagtattctacacaataagaaaagacaaagtcctcgagattcttatgagttttgtttgaaaactctttcactatatttgttgtaaagaggtttactattaaaagaaaaagaatacacgtttctgata

SEQ ID NO: 81 - DNA, 5106 bp, Homo sapiens
  source 1..5106: mol_type = genomic DNA
ttccggaagaggtcgccatggcttcccgggaggaggtactcgccttacaagctgaagttgcccaacgtgaggaggaattgaattcgctgaagcagaagctggcgtcggctcttttggctgagcaggaaccgcagccagaacggctggttccggtgtcgccgctgccgccgaaggccgctctgtcccgagatgagattctgcgctatagccggcagctagtgctgcccgagctgggcgtgcacggacagctgcgcctggggaccgcgtgcgtgctaatcgtgggctgcggtgggctcggctgtccactagcgcagtacttggcagcggccggcgtgggccgccttggccttgtggactatgacgtggtagagatgagcaacctggcccgccaagtgctgcatggcgaggcactggctggccaggccaaggccttttcggccgccgcctcgctgcgccgcctcaattcggcagtggaatgcgtgccgtacactcaggcccttacgccagccactgccctagacctggtccgccgatatgatgtggtggctgactgctcggacaacgtgcccactcgctacctggttaatgacgcatgtgtgctggcgggtcggcccctcgtgtctgccagtgccttgcgcttcgagggccaaatcacagtctaccattatgacggtggcccttgctatcgctgcatattcccccaaccacccccagcggagacagtgaccaactgcgcggacggcggggtgctcggtgtcgttaccggggtcctgggctgcctgcaggccttggaagtgctgaaaatcgctgcgggtctgggcccctcttacagtggcagcttgttgctctttgatgccctgagagggcatttccgctctattcggctgcggagccgcaggctcgactgtgcagcttgcggggaacggcccactgtgactgatctgctggactatgaagccttctgtggctcctcagccactgataaatgccgctccctgcaactactgagcccagaggagcgtgtttctgtcaccgactataagcgactgctggattctggggcattccacctgttgctggacgtcaggcctcaggtggaggtggacatttgtcgtttgcctcatgccctacacatccctctgaaacatttggaacgcagggatgcggagagcctgaaactcttaaaagaagcaatctgggaagagaagcagggcacacaagaaggggctgctgtccccatttatgtgatttgcaaactgggaaatgactcacagaaagccgtgaagatcctccagtccttatcagcagctcaagagttagaccctttaacagttcgggatgttgtggggggcctcatggcctgggctgccaaaatcgatggaacatttccacagtactgaggtgactggtatagtctgatgagaaagatgtggattgccataatacctcaaagatacacttgtttgcatttttcggtaatatacataggagctggggattctacagtatctgtgaatacgtggactcctttttataaggagttttaaaaattgttatgtattggatgaatgacttattaatggattataccgtttctgagaaccatcattttttttttcagcacacggaggatgtcttggacatgtgagatgtaacgtgacaggattttgcattttaaactgcagatcatttacatgtccttattttccacctcccccagtcaaaatgctttctaaatcattttcacagattatatacttcggatctgtttactgttcagttaagaaattcttggatcttattaatatttcagatgatagaatacatcctacagaaatacatgtttaaaatgtaaattgttttaattattcagaaagagggtcattctatttggccttttgaattagtatcaaaatgagattttttttttttttttgagatggaatctctctctgttgcccaggctggagtgtagtggtgcgatctcagctcactgcaacctccgcctcccaggttcaagcgattctcctgcctcagcctcctgagtagctgggattacaggcgcacgccaccacgcctggctaatttttgtatttttagtacagagggggtttcaccatgtttgtcaggctggtctcgaactcctgacctcgtgatccgcctgcctcgacttcccagagtgctgggattacaggcgtgagccaccacaccctcccgagatctttaaagtttaccaaaataaaggaaaccacctttgtagtctgtcagtgtctcttataaattgctactgttttcttaaagttaacttcagggtccaccttatgttgcacacatatcacatcgtttaaattgcatactatggtttgacttgctttggaattttcaagtcaaagtcccaaccctttgcctctccccctttaatttgccttttctcttttgatttaatgtttttttattccagcattttatactaatgtaaaatgtttttatgtttgtttacttaacattttcataaaatagtaggtagtctcaccaacttccaatatatacaacaacattataagtaaaaatttgatttgtgagtgcctatcagtggccagatgaactaatggcttgtcagaagggggcctgtgacctcctgcttgctgcatgcaggcttataatcatcaattgctgctgttgtttttttaagaatggcagaaatcacagatacaactataaaatctttgtatttctgttaaccattttttttaaagcttaaatgtatcataagccagcaaaaaccctttgtagaccagatttacttaccagtttgcaatttgtgatatagaatcttgttttattataagagggtggtatttaacaaattcaaaattagtcatcactttttaactgtgaaacattgtaactaattctttgaacaggtatacttaaagtatggtatacccttctgttataaagatgaagcaggtctcttatgactgttcctgccaacgagttatggaggtaaatgactgtgacctggagtggagaacaaagatggctggcctgtgtttttcatctccttcttccagggacaactgattctgatacatagcaggaaacaaatagcgacacacaggaacaatttcatattctaaagactgaagtcctaaagttatagacagttgtagttcctataaacctggttgtcacaggggacaggcaagagaagctgactagctaagtgttaaaaggtttactaaagtgataggaggtgcttttgagaattttggggacagattcaaggctgtacttctaggaatgatgcccgaaatcatgcacaaaactggccttaggagaacagtgtctatgttgtgctgccctatcaagtaccggaggaaacgccactacagtctcaccagtttcacttgacgtgcccccccaactctcccagaaagcccaacacttcagccacagtccatgtgtcgagaaacagagtcactacattattcttttctgagtcaagccttatgagggtgcctggtaggcagagtctaattacatgcctacatcttagctgcaagagaggctgggaatttgtgttttgatatctacaataggaagacagaactcatgatgtgggattttcccaaatagtgaaatatttttcaaaagatgggctgttaagaatataacagatacccagtacacaacccagatctatttcagtatttgttttttgttgttgttgttttggagacagagtctcgctctatcccccaggctggatggagtgcagcggcacaatctcggctcactgcaacctccacctcccatgttcaagtgattctcatgcctcagcctcctgagtagctgggattacaggcacctgccaccacatctggctaatttttctatttttagtagcgatggggtttcgccatgttggcctggctggtcttgaactcctgacctcaggtgatctgtgcacctcagcctcccaaagtgctaggattacaggcatgagtcactgcacctggcatatattagtatttgaaatttggttttctctggggattgtagctaggtttttatggtgagataggatttgaacataatttgttttttgagacgaagtcttgcttcgtcgcccagggtggagtgtagtgttgtgatcacagctcgctgtggcctcaacctcctgggttcaagtgatcctcccacctcagcctctcaagtagcttgaattacagttgtatgccaccatgcctagccattttttaatttaaaaattttttggtagcaatggggtctgaatatgtggcctaggctgatctcaaactcctgggctcaagcatccctcctgcctcagcctcccaaagtgcttgggattacgggtatgaggcaccatgcccagcctgaacttgatttttttgttgtttccttttcataacaaacatcaaatgccttcagtgtactagttcttctaggttctggaataaaaatgagcaagaggtttcctgttgtagaggagtttatatttaaatggtgataagtaaattactgataagtgccataaaagaaatgaaactgtgacatattagggtgggggaggggatctgttttgaatagcttaattatggaaggcctcagagatgacattaaacccaaaacctgaaaggtgagaaagagccagttacagaagatctgaggaaaattctatactgggagaaaaataactgtaaagacctcaaggtaaataaacttggaatgttccgttcaagaaactgcagaggcaagttgggttgcaaacaattagggagagtgggacagggtgaggtttgagaagcagggaacatcataaactttgtagaccatagtagtttggtttttattctaaatacaataatagctaatattttgagcacttactgtgttatttgggatttgaatccagatgctctggttgaagagcccattccctaagtgtcatgctatactgactctaagcaaaactttgccattgcttcatatgtgttcatgccctgtcagggcatagaaagcaatctatgtcctgacaatcacggaagtgtattccagatacaatagaaatgtactctgaga

SEQ ID NO: 82 - DNA, 705 bp, Homo sapiens
  source 1..705: mol_type = genomic DNA
gcgcagacgcagccgccctcggcgtcctctgtagcgggcgacctaggccgcgggacccggacggaggtagaggccagggcagcgcgtccgggagcggagtccgcgcccgccgccgccatgccggacagctgggacaaggatgtgtaccctgagcccccgcgccgcacgccggtgcagcccaatcccatcgtctacatgatgaaagcgttcgacctcatcgtggaccgacccgtgaccctcgtgagagaatttatagagcggcagcacgcaaagaacaggtattactactaccaccggcagtaccgccgcgtgccagacatcactgagtgcaaggaggaggacatcatgtgcatgtatgaagccgaaatgcagtggaagagggactacaaagtcgaccaagaaattatcaacattatgcaggatcggctcaaagcctgtcagcagagggaaggacagaactaccagcagaactgtatcaaggaagtggagcagttcacccaggtggccaaggcctaccaggaccgctatcaggacctgggggcctacagttctgccaggaagtgcctggccaaacagaggcagaggatgctgcaagagagaaaagctgcaaaagaggccgccgctgccacctcctgaggcagctgtgggtgcccctgctgtgtggctctgtatgactgttgctgaaatataaagccctgcaacctg

SEQ ID NO: 83 - DNA, 4302 bp, Homo sapiens
  source 1..4302: mol_type = genomic DNA
cagcgccgggagaaccgaacccctggcggccgcgaccccggctcccgccccggccccggcccgacccgccatgacggggctggaggaccaggagttcgacttcgagttcctcttcgagtttaaccagcgcgacgagggcgccgccgcggccgccccagaacactatggctatgcatcctccaacgtcagccccgccctgccgctccccacggcgcactccaccctgccggccccgtgccacaaccttcagacctccacaccgggcatcatcccgccggcggatcacccctcggggtacggagcagctttggacggtgggcccgcgggctacttcctctcctccggccacaccaggcctgatggggcccctgccctggagagtcctcgcatcgagataacctcgtgcttgggcctgtaccacaacaataaccagtttttccacgatgtggaggtggaagacgtcctccctagctccaaacggtccccctccacggccacgctgagtctgcccagcctggaggcctacagagacccctcgtgcctgagcccggccagcagcctgtcctcccggagctgcaactcagaggcctcctcctacgagtccaactactcgtacccgtacgcgtccccccagacgtcgccatggcagtctccctgcgtgtctcccaagaccacggaccccgaggagggctttccccgcgggctgggggcctgcacactgctgggttccccgcggcactccccctccacctcgccccgcgccagcgtcactgaggagagctggctgggtgcccgctcctccagacccgcgtccccttgcaacaagaggaagtacagcctcaacggccggcagccgccctactcaccccaccactcgcccacgccgtccccgcacggctccccgcgggtcagcgtgaccgacgactcgtggttgggcaacaccacccagtacaccagctcggccatcgtggccgccatcaacgcgctgaccaccgacagcagcctggacctgggagatggcgtccctgtcaagtcccgcaagaccaccctggagcagccgccctcagtggcgctcaaggtggagcccgtcggggaggacctgggcagccccccgcccccggccgacttcgcgcccgaagactactcctctttccagcacatcaggaagggcggcttctgcgaccagtacctggcggtgccgcagcacccctaccagtgggcgaagcccaagcccctgtcccctacgtcctacatgagcccgaccctgcccgccctggactggcagctgccgtcccactcaggcccgtatgagcttcggattgaggtgcagcccaagtcccaccaccgagcccactacgagacggagggcagccggggggccgtgaaggcgtcggccggaggacaccccatcgtgcagctgcatggctacttggagaatgagccgctgatgctgcagcttttcattgggacggcggacgaccgcctgctgcgcccgcacgccttctaccaggtgcaccgcatcacagggaagaccgtgtccaccaccagccacgaggccatcctctccaacaccaaagtcctggagatcccactcctgccggagaacagcatgcgagccgtcattgactgtgccggaatcctgaaactcagaaactccgacattgaacttcggaaaggagagacggacatcgggaggaagaacacacgggtacggctggtgttccgcgttcacgtcccgcaacccagcggccgcacgctgtccctgcaggtggcctccaaccccatcgaatgctcccagcgctcagctcaggagctgcctctggtggagaagcagagcacggacagctatccggtcgtgggcgggaagaagatggtcctgtctggccacaacttcctgcaggactccaaggtcattttcgtggagaaagccccagatggccaccatgtctgggagatggaagcgaaaactgaccgggacctgtgcaagccgaattctctggtggttgagatcccgccatttcggaatcagaggataaccagccccgttcacgtcagtttctacgtctgcaacgggaagagaaagcgaagccagtaccagcgtttcacctaccttcccgccaacgttccaattataaaaacagaacccactgatgattatgagcctgctccaacctgtggaccggtgagccaggggttaagtcctctcccaagaccatactacagccagcagctcgcgatgccacccgaccccagctcctgcctcgtggccggcttcccgccctgtccgcagagaagcaccctgatgccagcggcccctggcgtgagccccaagctccacgacctttctcccgctgcctacaccaagggcgttgccagcccgggccactgtcacctcggactcccgcagccggccggagaggcccccgccgtccaggacgtgcccaggccagtggccacgcaccccggctcgcccgggcagccacccccggccctgctgccacagcagtaaatgaaataatacgaaatgacctctccagcacgagcacccactcctagttgccacattggagcactcagttcagcaggggtatgctgacttcagcagacaaagacttttgaataaataaactgaactcacacctggtaccactcagaacctccaactgactgaatgccaggagctgaacattaatatgtgcaaagattggctctccaacaagaaggaaagcagggaggaagggagaccactgtgtcacctggaggagaagtcatctcatgacaacagaagggaggtggccgggctgagcacgggagacccaccgtgcaggggcctttcatgggaacggcccacacgcagtttgaccccacgcccagcccttctggcacccctggggttcaatactggaagtgccttatttaaccagaccatcagggcatcatagaattgagcattgaatttgctactgtaggagtatttttaggagcagaaactgcaaacacatttcattgtgaggttttaccctctgtatgaatgaagagaacgctggaaggctgcgagaggactctagtatgagtctccaacatttggaacgtttcctgggctgtcacgtacactcctgctgccttacacagtgcattttagaatcttccagtctgtcatctcagctcttttgtaacatgcttcccttgtctgcgcggttgaaaccgtaggcttgttcatagtcgcatgctcgcatctttgtttttaatctggcttcgaacatagcacaagtaacttgaatagcacatcaataggttactggacaaaagcagaaaaacctgttacaggatagcctgcatttgcatgtgtgtacatatctaggcatctatttatgtataaataataacagagccgacgtgtcctcgcccaggagggcttccctgtcagcaataaccggcatccgttttggaacctgcgtctggggctccagtcgctgctcttgctggcgtccatcgccgcctcggacggccgtgcattttctcgtctcacgcagttcgaggaggaccctagaaagccaggagctgtgattgacagtagctgtaggttaccagacggcaacattagaaagtgattgtaaataacatgcaacctaagtgtaatatatttgttcagttataagatgattgtttcacagaagccttaccactctctgcttcatctaagaaaaccaataccaaaaacgccactttaatgctcagccctgcgttgtgtgttttcagatgagttactgttaacaggtaggtttgtgtaggccttgctgggcactctgtacaattagttgcttattacgtatgattactcacagcgatctattgttccatataaccaaaaagcatggtttattcattgaaacacggttgacctgaactcgtgccttaggaattaatgcccccttatggaacctgcctgaattgcacctgcgggtggaggctccggctgtgaagtcactgaacagaacgtcgctgatggagaaagggctcccgcagaaggaacggcctgtaccgtgcgctccggcacaatcgcgtctcttgtgtctcactcacggaaagaaacaacctgaaggccatcccgtcggtctgcacgtaaccgtgaagacgtgtggccgcgtcccacctgcggctgggtaccctgcacccggcactgtaggagtcacgtgcagcctttctcaggggactgtcattgaaaaggaaacgtttgatgtctgtgtcagctgtctttgtagttaggaaatagatccaataaagccgtatttttttgctgga

SEQ ID NO: 84 - DNA, 7525 bp, Homo sapiens
  source 1..7525: mol_type = genomic DNA
agcaggaagctcgcgccgccgtcgccgccgccgctcagcttccccgggcgcgtccaggacccgctgcgccaggcgcgccgtccccggacccggcgtgcgtccctacgaggaaagggaccccgccgctcgagccgcctccgccagccccactgcgaggggtcccagagccagccgcgcccgccctcgcccccggccccgcagccttcccgccctgcgcgccatgaacgcccccgagcggcagccccaacccgacggcggggacgccccaggccacgagcctgggggcagcccccaagacgagcttgacttctccatcctcttcgactatgagtatttgaatccgaacgaagaagagccgaatgcacataaggtcgccagcccaccctccggacccgcataccccgatgatgtcctggactatggcctcaagccatacagcccccttgctagtctctctggcgagccccccggccgattcggagagccggatagggtagggccgcagaagtttctgagcgcggccaagccagcaggggcctcgggcctgagccctcggatcgagatcactccgtcccacgaactgatccaggcagtggggcccctccgcatgagagacgcgggcctcctggtggagcagccgcccctggccggggtggccgccagcccgaggttcaccctgcccgtgcccggcttcgagggctaccgcgagccgctttgcttgagccccgctagcagcggctcctctgccagcttcatttctgacaccttctccccctacacctcgccctgcgtctcgcccaataacggcgggcccgacgacctgtgtccgcagtttcaaaacatccctgctcattattcccccagaacctcgccaataatgtcacctcgaaccagcctcgccgaggacagctgcctgggccgccactcgcccgtgccccgtccggcctcccgctcctcatcgcctggtgccaagcggaggcattcgtgcgccgaggccttggttgccctgccgcccggagcctcaccccagcgctcccggagcccctcgccgcagccctcatctcacgtggcaccccaggaccacggctccccggctgggtacccccctgtggctggctctgccgtgatcatggatgccctgaacagcctcgccacggactcgccttgtgggatcccccccaagatgtggaagaccagccctgacccctcgccggtgtctgccgccccatccaaggccggcctgcctcgccacatctacccggccgtggagttcctggggccctgcgagcagggcgagaggagaaactcggctccagaatccatcctgctggttccgcccacttggcccaagccgctggtgcctgccattcccatctgcagcatcccagtgactgcatccctccctccacttgagtggccgctgtccagtcagtcaggctcttacgagctgcggatcgaggtgcagcccaagccacatcaccgggcccactatgagacagaaggcagccgaggggctgtcaaagctccaactggaggccaccctgtggttcagctccatggctacatggaaaacaagcctctgggacttcagatcttcattgggacagctgatgagcggatccttaagccgcacgccttctaccaggtgcaccgaatcacggggaaaactgtcaccaccaccagctatgagaagatagtgggcaacaccaaagtcctggagatacccttggagcccaaaaacaacatgagggcaaccatcgactgtgcggggatcttgaagcttagaaacgccgacattgagctgcggaaaggcgagacggacattggaagaaagaacacgcgggtgagactggttttccgagttcacatcccagagtccagtggcagaatcgtctctttacagactgcatctaaccccatcgagtgctcccagcgatctgctcacgagctgcccatggttgaaagacaagacacagacagctgcctggtctatggcggccagcaaatgatcctcacggggcagaactttacatccgagtccaaagttgtgtttactgagaagaccacagatggacagcaaatttgggagatggaagccacggtggataaggacaagagccagcccaacatgctttttgttgagatccctgaatatcggaacaagcatatccgcacacctgtaaaagtgaacttctacgtcatcaatgggaagagaaaacgaagtcagcctcagcactttacctaccacccagtcccagccatcaagacggagcccacggatgaatatgaccccactctgatctgcagccccacccatggaggcctggggagccagccttactacccccagcacccgatggtggccgagtccccctcctgcctcgtggccaccatggctccctgccagcagttccgcacggggctctcatcccctgacgcccgctaccagcaacagaacccagcggccgtactctaccagcggagcaagagcctgagccccagcctgctgggctatcagcagccggccctcatggccgccccgctgtcccttgcggacgctcaccgctctgtgctggtgcacgccggctcccagggccagagctcagccctgctccacccctctccgaccaaccagcaggcctcgcctgtgatccactactcacccaccaaccagcagctgcgctgcggaagccaccaggagttccagcacatcatgtactgcgagaatttcgcaccaggcaccaccagacctggcccgcccccggtcagtcaaggtcagaggctgagcccgggttcctaccccacagtcattcagcagcagaatgccacgagccaaagagccgccaaaaacggacccccggtcagtgaccaaaaggaagtattacctgcgggggtgaccattaaacaggagcagaacttggaccagacctacttggatgatgagctgatagacacacaccttagctggatacaaaacatattatgaaacagaatgactgtgatctttgatccgagaaatcaaagttaaagttaatgaaattatcaggaaggagttttcaggacctcctgccagaaatcagacgtaaaagaagccattatagcaagacaccttctgtatctgacccctcggagccctccacagcccctcaccttctgtctcctttcatgttcatctcccagcccggagtccacacgcggatcaatgtatgggcactaagcggactctcacttaaggagctcgccacctccctctaaacaccagagagaactcttcttttcggtttatgttttaaatcccagagagcatcctggttgatcttaatggtgttccgtccaaatagtaagcacctgctgaccaaaagcacattctacatgagacaggacactggaactctcctgagaacagagtgactggagcttggggggatggacgggggacagaagatgtgggcactgtgattaaaccccagcccttgcgttcgtttttccaggtcacagatacagctcctgtaccttttgaaggcaaggagttctcagagcaaccaaaggaacgtgacccaagagcccagcttacaggctgaagaaacccaaaaccctcgatagagacagaaactgaactgtcagtccttagagctcgcccagtccatgccacaactgggccacagctaaagctttatttttgaattctcattccaaaaccaaactgtcttgcccagacaagatcacctgttaagacttcttggcgttaagttatgacatgtatacgcgtttgttattattattttttctgctttaaaaggctgaccagggcacctagccctggagctgtcttggcgagctgttctttaacccctgcagcacgcagtcctgctaacacaatttccatagacttggggggctgacccaggctgcagagagcaagcacctgtctgctgcagctgtacaacctggatgctttgcaaggttccggcttgctttcttcctagcagccagagtgcttttccgtaaagcggtggagaatctcaagcatgtgcatttaattgaggaatagcagaagggctaaagcaaccaagaaaagaagtgtgggtatttttgttaagtaaaacagcccaagtgcttctggaggtgggtttctaccaagatagaggaaaagggctgaattccctctaagtgggacagccgagctcaggatgtgcttcccagcttcactggttaatttgacctgaacctatttaaagatcccttctgcccctgaagacctatccgcactcaaattctaacatgaagaaatctactcgaatgcatcctttactttgaatgagctctattcggttgcatgttatatgtgatttccttcctcccaactgtttccactgagcgcacccagtctcccctagtcttcctctgtgggtgtgatttttgtgatttttacaaacaaaacccttgaagttcttggcagatgtgtttgtttctgtttgcatgtactgcagataccccaggacaagcgggggattcatttttcagccattcagttgtttcctcaataatccgcagcaaagtgaaaatattcttagcactcagactgtacttagagtgttttctcagtccagtctgtacagtctgtaggcagaaggcctcagaagaaagtcatggccactcagtgcccactgtgggctttgtaagtcctggctctcccgtcaaggttacccagaggtaaaagcttcctgggagtggggccaggtgtgtttggcactccagatagaaggcaaaatgctcagattcgggcctgtgcacttgtatgcaacctgtcggtcgatacctagcatttatttttccctgacaatgaacgacctttccctcacccaccctaagctcaaagagtttagcaaaattctcttttaaataaacagaatgccagtaagaggttgacccctaccatggaacttctgggatgctaaatacttcctcatgaacaaaataagttccttattataagttccttatactagcagcttcacctaaagaattttctctccagcaatattgacttcactggggaaaagccaagagtgtgtggtgagtgatttgttctcactcgacctggctaggactggctaggagctgttttttgtacatgagggaatttgggctttcctcagttatctgaatgttttacccaagtgccttcctgctattgtagcaaagtagctcagcttccttgtccacagggtgaaaaaggactaatgcattttccatcagttttctaactatgttagcaaaaacggcctcctggtagctcaacctcctgtacgcgtgtgtgtgtgtaatacacacacaaataaacccctctgtttttctaagacatcttagctggatattataggaagcactttcataaacaactgtaacaaatcgcaaaggaaagagaaacaaaagcattagatttgagacataaacaggcaagagaaagtgtattaggaactgacagctatcaaggaagttttgtcagttacaaatgctaggaggaaattttgccaagaaggatggctcatgaaatatttccagtacgggaagaggcaataagatcctctaagagaatgagaaagtaggggtgtctaaatggtaaagatgggtgtgttgcacgtgtgttagaaggatctcagttgagtgaaggtttgcactgctacatctaagttaatgtaaatatgtagcactctgacaggtctaccgtgttgctgaatgtagtatatttccaaagtttgcaagtcttcctgtattgtacaaagatgctgctgcttgataatatgtatagcaatccagattagtatgttattaaattttattttcttacctgtatttttatgctttttacctgtcctcaaaatattacacccctgttggaattagatttatatttataaatggtcagaaatctttttaagtgtctctttttacacataggttgatttttttttcttaagagaaatgatgtattcttgaaacatttgttactcattccaggaaacaaaaacccatataataaaacccccactcagagcctgttagtcacctctctagaagatggcatctcaggagaaggaatggctttgtggaagaaggaatcacctttttcttgctcaagaattatgctgacttcagccctgagcctggatctggtcactgagaatcatcaagtgtctagatcctccccccaaaataactaatttagtaggtgattttgattttaaaaaattgacaccaaaaccctgcctgcattgtaatggaattcgaaaagaattcatgttcacagaactcaacgttcaggctaatatttacagaagggaccaaatctaaatcctggtagataactcctgtatgctttatccaaaggacacccacagttttccagcatagatataaccaaggatgaattgattccttcaaagaactgggaggcacggatattgcattttttgtttacatccagtagccaagacgcctcagtgagccagtcttgggcagaggctgtcacatttaggcagattggaagttggtatgttctaattctcactctggactacagtgaggctgaatttatcatgtcaaaaaaaaaaaaaaaaaaagacctttccaagtgctttctattgctcagaattgaaagaatgttttcatttcaagtttacaagaggcatggatggagttgtgacgttcttgacaagctgggctaacctttcccgaacttgtttcccggaggcaaggtgctcggtgacccagcgcatcttaaccttgggtctcctaggctcgaggctagggcattacgtttcgtggaaccaaagcagccaattgcatagcaagtattttcctgcattccaattaaatgcttaagaaaaagcagcatcctataaaattgtgatcataaacatccatttccctcagcttttgtgagtgccttgacttacagccaacatcactgtttaactcagtctgtttaaaaacaaacttttctggtggttgataacagagagttgctccctgagccatcagggtcctgggagctggaagtgaaagggttattaacattctacctttatgcagctgttggctgaccagaataaactccctgctgagttcaagctttgaatggaatggatgcaaatgatgttgtttccattagagcaggtgctcacagcattctgattggcctgagcagaccgaggctatggctgttgggacaagcttagcatcctggacatcttgtcaaagaacctcactcacccctctggcctctacagccctcagaggagagaaaaccaattctccaacaaacaggtctctccaacatggtggtgctggcaggcttaggtttagaaaatcctgactgttaaaggcgtttgaatacatcacattcctatgcaaatgtttttaatctccagtttaatgtagtttatttttcctatatgtaaagtatttttatacggcttgtatcatgatagtttagcaataaaacagttggaagcaacatcta

SEQ ID NO: 85 - DNA, 2528 bp, Homo sapiens
  source 1..2528: mol_type = genomic DNA
gtcacggagcgcttaagaggagggtcgggctcggccggggagtcccagtggcggaggctacgaaacttgggggagtgcacagaagaacttcgggagcgcacgcgggaccagggaccaggctgagactcggggcgccagtccgggcaggggcagcgggagccggccggagatgccctgtatccaagcccaatatgggacaccagcaccgagtccgggaccccgtgaccacctggcaagcgaccccctgacccctgagttcatcaagcccaccatggacctggccagccccgaggcagcccccgctgcccccactgccctgcccagcttcagcaccttcatggacggctacacaggagagtttgacaccttcctctaccagctgccaggaacagtccagccatgctcctcagcctcctcctcggcctcctccacatcctcgtcctcagccacctcccctgcctctgcctccttcaagttcgaggacttccaggtgtacggctgctaccccggccccctgagcggcccagtggatgaggccctgtcctccagtggctctgactactatggcagcccctgctcggccccgtcgccctccacgcccagcttccagccgccccagctctctccctgggatggctccttcggccacttctcgcccagccagacttacgaaggcctgcgggcatggacagagcagctgcccaaagcctctgggcccccacagcctccagccttcttttccttcagtcctcccaccggccccagccccagcctggcccagagccccctgaagttgttcccctcacaggccacccaccagctgggggagggagagagctattccatgcctacggccttcccaggtttggcacccacttctccacaccttgagggctcggggatactggatacacccgtgacctcaaccaaggcccggagcggggccccaggtggaagtgaaggccgctgtgctgtgtgtggggacaacgcttcatgccagcattatggtgtccgcacatgtgagggctgcaagggcttcttcaagcgcacagtgcagaaaaacgccaagtacatctgcctggctaacaaggactgccctgtggacaagaggcggcgaaaccgctgccagttctgccgcttccagaagtgcctggcggtgggcatggtgaaggaagttgtccgaacagacagcctgaaggggcggcggggccggctaccttcaaaacccaagcagcccccagatgcctcccctgccaatctcctcacttccctggtccgtgcacacctggactcagggcccagcactgccaaactggactactccaagttccaggagctggtgctgccccactttgggaaggaagatgctggggatgtacagcagttctacgacctgctctccggttctctggaggtcatccgcaagtgggcggagaagatccctggctttgctgagctgtcaccggctgaccaggacctgttgctggagtcggccttcctggagctcttcatcctccgcctggcgtacaggtctaagccaggcgagggcaagctcatcttctgctcaggcctggtgctacaccggctgcagtgtgcccgtggcttcggggactggattgacagtatcctggccttctcaaggtccctgcacagcttgcttgtcgatgtccctgccttcgcctgcctctctgcccttgtcctcatcaccgaccggcatgggctgcaggagccgcggcgggtggaggagctgcagaaccgcatcgccagctgcctgaaggagcacgtggcagctgtggcgggcgagccccagccagccagctgcctgtcacgtctgttgggcaaactgcccgagctgcggaccctgtgcacccagggcctgcagcgcatcttctacctcaagctggaggacttggtgccccctccacccatcattgacaagatcttcatggacacgctgcccttctgacccctgcctgggaacacgtgtgcacatgcgcactctcatatgccaccccatgtgcctttagtccacggacccccagagcacccccaagcctgggcttgagctgcagaatgactccaccttctcacctgctccaggaggtttgcagggagctcaagcccttggggagggggatgccttcatgggggtgaccccacgatttgtcttatcccccccagcctggccccggcctttatgttttttgtaagataaaccgtttttaacacatagcgccgtgctgtaaataagcccagtgctgctgtaaatacaggaagaaagagcttgaggtgggagcggggctgggaggaagggatgggccccgccttcctgggcagcctttccagcctcctgctggctctctcttcctaccctccttccacatgtacataaactgtcactctaggaagaagacaaatgacagattctgacatttatatttgtgtattttcctggatttatagtatgtgacttttctgattaatatatttaatatattgaataaaaaatagacatgtagttggaactg

SEQ ID NO: 86 - DNA, 3472 bp, Homo sapiens
  source 1..3472: mol_type = genomic DNA
acataaacaaaggcacattggcggccagggccagtccgcccggcggctcgcgcacggctccgcggtcccttttgcctgtccagccggccgcctgtccctgctccctccctccgtgaggtgtccgggttcccttcgcccagctctcccacccctacccgaccccggcgcccgggctcccagagggaactgcacttcggcagagttgaatgaatgaagacagacgcggagaactcctaaggaggagattggacaggctggactccccattgcttttctaaaaatcttggaaactttgtccttcattgaattacgacactgtccacctttaatttcctcgaaaacgcctgtaactcggctgaagccatgccttgtgttcaggcgcagtatgggtcctcgcctcaaggagccagccccgcttctcagagctacagttaccactcttcgggagaatacagctccgatttcttaactccagagtttgtcaagtttagcatggacctcaccaacactgaaatcactgccaccacttctctccccagcttcagtacctttatggacaactacagcacaggctacgacgtcaagccaccttgcttgtaccaaatgcccctgtccggacagcagtcctccattaaggtagaagacattcagatgcacaactaccagcaacacagccacctgcccccccagtctgaggagatgatgccgcactccgggtcggtttactacaagccctcctcgcccccgacgcccaccaccccgggcttccaggtgcagcacagccccatgtgggacgacccgggatctctccacaacttccaccagaactacgtggccactacgcacatgatcgagcagaggaaaacgccagtctcccgcctctccctcttctcctttaagcaatcgccccctggcaccccggtgtctagttgccagatgcgcttcgacgggcccctgcacgtccccatgaacccggagcccgccggcagccaccacgtggtggacgggcagaccttcgctgtgcccaaccccattcgcaagcccgcgtccatgggcttcccgggcctgcagatcggccacgcgtctcagctgctcgacacgcaggtgccctcaccgccgtcgcggggctccccctccaacgaggggctgtgcgctgtgtgtggggacaacgcggcctgccaacactacggcgtgcgcacctgtgagggctgcaaaggcttctttaagcgcacagtgcaaaaaaatgcaaaatacgtgtgtttagcaaataaaaactgcccagtggacaagcgtcgccggaatcgctgtcagtactgccgatttcagaagtgcctggctgttgggatggtcaaagaagtggttcgcacagacagtttaaaaggccggagaggtcgtttgccctcgaaaccgaagagcccacaggagccctctcccccttcgcccccggtgagtctgatcagtgccctcgtcagggcccatgtcgactccaacccggctatgaccagcctggactattccaggttccaggcgaaccctgactatcaaatgagtggagatgacacccagcatatccagcaattctatgatctcctgactggctccatggagatcatccggggctgggcagagaagatccctggcttcgcagacctgcccaaagccgaccaagacctgctttttgaatcagctttcttagaactgtttgtccttcgattagcatacaggtccaacccagtggagggtaaactcatcttttgcaatggggtggtcttgcacaggttgcaatgcgttcgtggctttggggaatggattgattccattgttgaattctcctccaacttgcagaatatgaacatcgacatttctgccttctcctgcattgctgccctggctatggtcacagagagacacgggctcaaggaacccaagagagtggaagaactgcaaaacaagattgtaaattgtctcaaagaccacgtgactttcaacaatggggggttgaaccgccccaattatttgtccaaactgttggggaagctcccagaacttcgtaccctttgcacacaggggctacagcgcattttctacctgaaattggaagacttggtgccaccgccagcaataattgacaaacttttcctggacactttacctttctaagacctcctcccaagcacttcaaaggaactggaatgataatggaaactgtcaagagggggcaagtcacatgggcagagatagccgtgtgagcagtctcagctcaagctgccccccatttctgtaaccctcctagcccccttgatccctaaagaaaacaaacaaacaaacaaaaactgttgctatttcctaacctgcaggcagaacctgaaagggcattttggctccggggcatcctggatttagaacatggactacacacaatacagtggtataaactttttattctcagtttaaaaatcagtttgttgttcagaagaaagattgctataatgtataatgggaaatgtttggccatgcttggttgttgcagttcagacaaatgtaacacacacacacatacacacacacacacacacacagagacacatcttaaggggacccacaagtattgccctttaacaagacttcaaagttttctgctgtaaagaaagctgtaatatatagtaaaactaaatgttgcgtgggtggcatgagttgaagaaggcaaaggcttgtaaatttacccaatgcagtttggctttttaaattattttgtgcctatttatgaataaatattacaaattctaaaagataagtgtgtttgcaaaaaaaaagaaaataaatacataaaaaagggacaagcatgttgattctaggttgaaaatgttataggcacttgctacttcagtaatgtctatattatataaatagtatttcagacactatgtagtctgttagattttataaagattggtagttatctgagcttaaacattttctcaattgtaaaataggtgggcacaagtattacacatcagaaaatcctgacaaaagggacacatagtgtttgtaacaccgtccaacattccttgtttgtaagtgttgtatgtaccgttgatgttgataaaaagaaagtttatatcttgattattttgttgtctaaagctaaacaaaacttgcatgcagcagcttttgactgtttccagagtgcttataatatacataactccctggaaataactgagcactttgaattttttttatgtctaaaattgtcagttaatttattattttgtttgagtaagaattttaatattgccatattctgtagtatttttctttgtatatttctagtatggcacatgatatgagtcactgcctttttttctatggtgtatgacagttagagatgctgattttttttctgataaattctttctttgagaaagacaattttaatgtttacaacaataaaccatgtaaatgaacagaa

SEQ ID NO: 87 - DNA, 5706 bp, Homo sapiens
  source 1..5706: mol_type = genomic DNA
ataaatgacgtgccgagagagcgagcgaacgcgcagccgggagagcggagtctcctgcctcccgccccccacccctccagctcctgctcctcctccgctccccatacacagacgcgctcacacccgctccctcactcgcacacacagacacaagcgcgcacacaggctccgcacacacacttcgctctcccgcgcgctcacacccctcttgccctgagcccttgccggtgcagcgcggcgccgcagctggacgcccctcccgggctcactttgcaacgctgacggtgccggcagtggccgtggaggtgggaacagcggcggcatcctcccccctggtcacagcccaagccaggacgcccgcggaacctctcggctgtgctctcccatgagtcgggatcgcagcatcccccaccagccgctcaccgcctccgggagccgctgggcttgtacaccgcagcccttccgggacagcagctgtgactcccccccagtgcagatttcgggacagctctctagaaactcgctctaaagacggaaccgccacagcactcaaagcccactgcggaagagggcagcccggcaagcccgggccctgagcctggacccttagcggtgccgggcagcactgccggcgcttcgcctcgccggacgtccgctcctcctacactctcagcctccgctggagagacccccagccccaccattcagcgcgcaagataccctccaggccctcatcaccttttttcaagtcaagatttcatcccatacatgcatgactcaatcagatttggaaatgtggatatgccctgcgtccaagcccaatatagcccttcccctccaggttccagttatgcggcgcagacatacagctcggaatacaccacggagatcatgaaccccgactacaccaagctgaccatggaccttggcagcactgagatcacggctacagccaccacgtccctgcccagcatcagtaccttcgtggagggctactcgagcaactacgaactcaagccttcctgcgtgtaccaaatgcagcggcccttgatcaaagtggaggaggggcgggcgcccagctaccatcaccatcaccaccaccaccaccaccaccaccaccatcaccagcagcagcatcagcagccatccattcctccagcctccagcccggaggacgaggtgctgcccagcacctccatgtacttcaagcagtccccaccgtccacccccaccacgccggccttccccccgcaggcgggggcgttatgggacgaggcactgccctcggcgcccggctgcatcgcacccggcccgctgctggacccgccgatgaaggcggtccccacggtggccggcgcgcgcttcccgctcttccacttcaagccctcgccgccgcatccccccgcgcccagcccggccggcggccaccacctcggctacgacccgacggccgctgccgcgctcagcctgccgctgggagccgcagccgccgcgggcagccaggccgccgcgcttgagagccacccgtacgggctgccgctggccaagagggcggccccgctggccttcccgcctctcggcctcacgccctcccctaccgcgtccagcctgctgggcgagagtcccagcctgccgtcgccgcccagcaggagctcgtcgtctggcgagggcacgtgtgccgtgtgcggggacaacgccgcctgccagcactacggcgtgcgaacctgcgagggctgcaagggctttttcaagagaacagtgcagaaaaatgcaaaatatgtttgcctggcaaataaaaactgcccagtagacaagagacgtcgaaaccgatgtcagtactgtcgatttcagaagtgtctcagtgttggaatggtaaaagaagttgtccgtacagatagtctgaaagggaggagaggtcgtctgccttccaaaccaaagagcccattacaacaggaaccttctcagccctctccaccttctcctccaatctgcatgatgaatgcccttgtccgagctttaacagactcaacacccagagatcttgattattccagatactgtcccactgaccaggctgctgcaggcacagatgctgagcatgtgcaacaattctacaacctcctgacagcctccattgatgtatccagaagctgggcagaaaagattccgggatttactgatctccccaaagaagatcagacattacttattgaatcagcctttttggagctgtttgtcctcagactttccatcaggtcaaacactgctgaagataagtttgtgttctgcaatggacttgtcctgcatcgacttcagtgccttcgtggatttggggagtggctcgactctattaaagacttttccttaaatttgcagagcctgaaccttgatatccaagccttagcctgcctgtcagcactgagcatgatcacagaaagacatgggttaaaagaaccaaagagagtcgaagagctatgcaacaagatcacaagcagtttaaaagaccaccagagtaagggacaggctctggagcccaccgagtccaaggtcctgggtgccctggtagaactgaggaagatctgcaccctgggcctccagcgcatcttctacctgaagctggaagacttggtgtctccaccttccatcattgacaagctcttcctggacaccctacctttctaatcaggagcagtggagcagtgagctgcctcctctcctagcacctgcttgctacgcagcaaagggataggtttggaaacctatcatttcctgtccttccttaagaggaaaagcagctcctgtagaaagcaaagactttcttttttttctggctcttttccttacaacctaaagccagaaaacttgcagagtattgtgttggggttgtgttttatatttaggcattgggggatggggtgggagggggttatagttcatgagggttttctaagaaattgctaacaaagcacttttggacaatgctatcccagcaggaaaaaaaaggataatataactgttttaaaactctttctggggaatccaattatagttgctttgtatttaaaaacaagaacagccaagggttgttcgccagggtaggatgtgtcttaaagattggtcccttgaaaatatgcttcctgtatcaaaggtacgtatgtggtgcaaacaaggcagaaacttccttttaatttccttcttcctttattttaacaaatggtgaaagatggaggattacctacaaatcagacatggcaaaacaataatggctgtttgcttccataaacaagtgcaattttttaaagtgctgtcttactaagtcttgtttattaactctcctttattctatatggaaataaaaaggaggcagtcatgttagcaaatgacacgttaatatccctagcagaggctgtgttcaccttccctgtcgatcccttctgaggtatggcccatccaagacttttaggccattcttgatggaaccagatccctgccctgactgtccagctatcctgaaagtggatcagattataaactggattacatgtaactgttttggttgtgttctatcaaccccaccagagttccctaaacttgcttcagttatagtaactgactggtatattcattcagaagcgccataagtcagttgagtatttgatccctagataagaacatgcaaatcagcaggaactggtcatacagggtaagcaccagggacaataaggatttttatagatataatttaatttttgttattggttaaggagacaattttggagagcaagcaaatctttttaaaaaatagtatgaatgtgaatactagaaaagatttaaaaaatagtatgagtgtgagtactaggaaggattagtgggctgcgtttcaacattccgtgttcgtactcccttttgtatgtttctactgttaatgccatattactatgagataatttgttgcatagtgtccttatttgtataaacatttgtatgcacgttatattgtaatagctttgcctgtatttattgcaagaccaccagctcctggaagctgagttacagagtaattaaatggggtgttcacagtgacttggatacaccaattagaaattaaataagcaaatatatatatatatataaatatagcaggttacatatatatatttataatgtgtctttttattaaccatttgtacaataaatgtcacttcccatgccgttattttatggttcatttgcagtgacttttaaggcagtactgtttagcactttgatattaaaattttgcttatgttttgctaaattcgaataatgtttgaagatttttaggtctaaaagtctttatattatatactctgtatcaagtcaaaatatctttggccattttgctaagaaacaaactttgaatgtcaaactgatgtcacagtagtttttgttagctttaaatcatttttgctttagtctttttaaaggaaaataacaaaactatgctgtttatattgtcattaaattatacaatcaaacaaatgccaaatgaattgcctaattgctgcaaagtataacccagataggaaatcatatgtttttttccaagagtcattctaatatttgattatgttatgtgtgcttttatgaaagattgttatttttatatatcaagatgatagaacctggaatgttaggattttgaaatgttagacttggaaggggcctggtctgtcaactagtccaaccccttaaaattcatagaggagcaaactggggcccattgaagggtgaagagttactcaaggtcaaacagctggtaacagaatcaagactaagacctaatttacctttccatactctttttttttctcaacttcatctatataaaatcaggcttttaaacataaccactaatatttacctgaagataaccatgagtaaagtatacttttgcattaattttttgagcttatatgcaaacataataaatattattaaatatcaggaaagctaacatttcatacaagatagcttcagaccaaattcaaattgaatttgaataaattagaaatactgtgcatacataaccttcttgtgcaccatgagtatttggaaagttaatccttgtttttgtcgtgtctataaaggaagaacaaaacaaaataaaaacagagccctagagaaatgctgttactttttatttttacacccatcagatttaaggaaaagactttttagccattataatctagtggttggaaggaatgaagaagcttttttagtaataggtccagatatgagtgctaaaaataaagatgatagcatgttcttctgtcttccatagttattacaactatgagagcctcccaagtcatcttatcaactcaactcccttttttttgtcttaatgttgcacataagtttatacagagtggatgaccacactagcacagaagagaacaacatgtattaaagcaggtgattcctccccttggcgggagagctctctcagtgtgaacatgccttctgtgggcggaaatcaggaagccaccagctgttaatggagagtgccttgcttttatttcagacagcagagttttccaaagtttctctgctcctctaacagcattgctctttagtgtgtgttaacctgtggtttgaaagaaatgctcttgtacattaacaatgtaaatttaaatgattaaattacattttatcaatggc

SEQ ID NO: 88 - DNA, 3548 bp, Homo sapiens
  source 1..3548: mol_type = genomic DNA
gcactcgcccggctcgcccgctttcgcacccagttcacgcgccacagctatgtgtccccgagccgcgcgggcgcccgcgacgctactcctcgccctgggcgcggtgctgtggcctgcggctggcgcctgggagcttacgattttgcacaccaacgacgtgcacagccggctggagcagaccagcgaggactccagcaagtgcgtcaacgccagccgctgcatgggtggcgtggctcggctcttcaccaaggttcagcagatccgccgcgccgaacccaacgtgctgctgctggacgccggcgaccagtaccagggcactatctggttcaccgtgtacaagggcgccgaggtggcgcacttcatgaacgccctgcgctacgatgccatggcactgggaaatcatgaatttgataatggtgtggaaggactgatcgagccactcctcaaagaggccaaatttccaattctgagtgcaaacattaaagcaaaggggccactagcatctcaaatatcaggactttatttgccatataaagttcttcctgttggtgatgaagttgtgggaatcgttggatacacttccaaagaaaccccttttctctcaaatccagggacaaatttagtgtttgaagatgaaatcactgcattacaacctgaagtagataagttaaaaactctaaatgtgaacaaaattattgcactgggacattcgggttttgaaatggataaactcatcgctcagaaagtgaggggtgtggacgtcgtggtgggaggacactccaacacatttctttacacaggcaatccaccttccaaagaggtgcctgctgggaagtacccattcatagtcacttctgatgatgggcggaaggttcctgtagtccaggcctatgcttttggcaaatacctaggctatctgaagatcgagtttgatgaaagaggaaacgtcatctcttcccatggaaatcccattcttctaaacagcagcattcctgaagatccaagcataaaagcagacattaacaaatggaggataaaattggataattattctacccaggaattagggaaaacaattgtctatctggatggctcctctcaatcatgccgctttagagaatgcaacatgggcaacctgatttgtgatgcaatgattaacaacaacctgagacacacggatgaaatgttctggaaccacgtatccatgtgcattttaaatggaggtggtatccggtcgcccattgatgaacgcaacaatggcacaattacctgggagaacctggctgctgtattgccctttggaggcacatttgacctagtccagttaaaaggttccaccctgaagaaggcctttgagcatagcgtgcaccgctacggccagtccactggagagttcctgcaggtgggcggaatccatgtggtgtatgatctttcccgaaaacctggagacagagtagtcaaattagatgttctttgcaccaagtgtcgagtgcccagttatgaccctctcaaaatggacgaggtatataaggtgatcctcccaaacttcctggccaatggtggagatgggttccagatgataaaagatgaattattaagacatgactctggtgaccaagatatcaacgtggtttctacatatatctccaaaatgaaagtaatttatccagcagttgaaggtcggatcaagttttccacaggaagtcactgccatggaagcttttctttaatatttctttcactttgggcagtgatctttgttttataccaatagccaaaaattctccttgcctttaatgtgtgaaactgcattttttcaagtgagattcaaatctgccttttaggacctggctttgtgacagcaaaaaccatctttacaggctcctagaagctgaaggttagagcattataaaatgaagagacagacatgattactcagggtcagcaacctagtgagttagaaaaaaaattaacatagggccctataaggagaaagccaactatgttaagtttacgtgtccaaattttaatgaaattttactaacaattttaaaccatatttttcttcttcatatccatttctaatccatcaaacagcttatgtttacataaaattttatcattcacaaggaagttttaagcacactgtctcatttgatatccacaacttatttttggtaggaaagagagatgtttttcccacctgtcagatgaaaaaactgaagctcaaaaagggttgacttgaccatacagctaatgctgacagatccaagacctagacctaggtcttttgaactcaagtccagcattctcaactatatcaagttactgttcagaatacttaatatctcctctcttcataattatcaatagccccaagctcatggatgacaaatctctgctttatttcttgtctctattttttcactttatagctcctgttataatagcaagtttaatggtataaacacaggataccatcctctcttgcaacacccatgtgcctttgatgagtcaggtagcaagctgtagtagataatgagaaaggccagaggctgcaaaagacagtcaaaggacacgagagaaaggaaggggaagaacaggactccaggactgttttatattatagaaaagcaagagctaaagagcatttacacatgttaaacagatacttgttaagcatagtgcctgacacacggcattagctgttattttatgagattccatcagctctgcctctgtcctctttcttctaacatgaaggtatcatgagaagagaaccttctaacataagctgtaattctaaacctgcacttgtccctctccagcaagaggctagcactgaattcattctactcatactacacacccagttatggaatgtccagagttctcgaagaaaataaatgactttaggaagaggtatacattttttaagtcgctctgcctccaaatctgaacagtcactgtaaatcattcttaagcccagatatgagaacttctgctggaaagtgggaccctctgagtgggtggtcagaaaatacccatgctgatgaaatgacctatgcccaaagaacaaatacttaacgtgggagtggaaccacatgagcctgctcagctctgcataagtaattcaagaaatgggaggcttcaccttaaaaacagtgtgcaaatggcagctagaggttttgataggaagtatgtttgtttcttagtgtttacaaatattaagtactcttgatacaaaatatacttttaaacttcataacctttttataaaagttgttgcagcaaaataatagcctcggttctatgcatatatggattagctataaaaaatgtcaataagattgtacaaggaaaattagagaaagtcacatttagggtttattttttacacttggccagtaaaatagggtaaatcctattagaattttttaaagaactttttttaagtttcctaaatctgtgtgtgtattgtgaagtggtataagaaatgactttgaaccactttgcaattgtagattcccaacaataaaattgaagat

SEQ ID NO: 89 - DNA, 7523 bp, Homo sapiens
  source 1..7523: mol_type = genomic DNA
tccatgggttccaagagaagaagagctacctccccttccagcagtgtcagcggggactttgatgatgggcaccattctgtgtcaacaccaggcccaagcaggaaaaggaggagactttccaatcttccaactgtagatcctattgccgtgtgccatgaactctataataccatccgagactataaggatgaacagggcagacttctctgtgagctcttcattagggcaccaaagcgaagaaatcaaccagactattatgaagtggtttctcagcccattgacttgatgaaaatccaacagaaactaaaaatggaagagtatgatgatgttaatttgctgactgctgacttccagcttctttttaacaatgcaaagtcctattataagccagattctcctgaatataaagccgcttgcaaactctgggatttgtaccttcgaacaagaaatgagtttgttcagaaaggagaagcagatgacgaagatgatgatgaagatgggcaagacaatcagggcacagtgactgaaggatcttctccagcttacttgaaggagatcctggagcagcttcttgaagccatagttgtagctacaaatccatcaggacgtctcattagcgaactttttcagaaactgccttctaaagtgcaatatccagattattatgcaataattaaggagcctatagatctcaagaccattgcccagaggatacagaatggaagctacaaaagtattcatgcaatggccaaagatatagatctcctcgcaaaaaatgccaaaacttataatgagcctggctctcaagtattcaaggatgcaaattcaattaaaaaaatattttatatgaaaaaggctgaaattgaacatcatgaaatggctaagtcaagtcttcgaatgagtaataaaagagcagtacaaggaggtcgtttatcagcaattacaatggcacttcaatatggctcagaaagtgaagaagatgctgctttagctgctgcacgctatgaagagggagagtcagaagcagaaagcatcacttcctttatggatgtttcaaatcctttttatcagctttatgacacagttaggagttgtcggaataaccaagggcagctaatagctgaacctttttaccatttgccttcaaagaaaaaataccctgattattaccagcaaattaaaatgcccatatcactacaacagatccgaacaaaactgaagaatcaagaatatgaaactttagatcatttggagtgtgatctgaatttaatgtttgaaaatgccaaacgctataatgtgcccaattcagccatctacaagcgagttctaaaattgcagcaagttatgcaggcaaagaagaaagagcttgccaggagagacgatatcgaggacggagacagcatgatctcttcagccacctctgatactggtagtgccaaaagaaaaagtaaaaagaacataagaaagcagcgaatgaaaatcttattcaatgttgttcttgaagctcgagagccaggttcaggcagaagactttgtgacctatttatggttaaaccatccaaaaaggactatcctgattattataaaatcatcttggagccaatggacttgaaaataattgagcataacatccgcaatgacaaatatgctggtgaagagggaatgatagaagacatgaagctgatgttccggaatgccaggcactataatgaggagggctcccaggtttataatgatgcacatatcctggagaagttactcaaggagaaaaggaaagagctgggcccactgcctgatgatgatgacatggcttctcccaaactcaagctgagtaggaagagtggcatttctcctaaaaaatcaaaatacatgactccaatgcagcagaaactaaatgaggtctatgaagctgtaaagaactatactgataagaggggtcgccgcctcagtgccatatttctgaggcttccctctagatctgagttgcctgactactatctgactattaaaaagcccatggacatggaaaaaattcgaagtcacatgatggccaacaagtaccaagatattgactctatggttgaggactttgtcatgatgtttaataatgcctgtacatacaatgagccggagtctttgatctacaaagatgctcttgttctacacaaagtcctgcttgaaacacgcagagacctggagggagatgaggactctcatgtcccaaatgtgactttgctgattcaagagcttatccacaatctttttgtgtcagtcatgagtcatcaggatgatgagggaagatgctacagcgattctttagcagaaattcctgctgtggatcccaactttcctaacaaaccaccccttacatttgacataattaggaagaatgttgaaaataatcgctaccgtcggcttgatttatttcaagagcatatgtttgaagtattggaacgagcaagaaggatgaatcggacagattcagaaatatatgaagatgcagtagaacttcagcagttttttattaaaattcgtgatgaactctgcaaaaatggagagattcttctttcaccggcactcagctataccacaaaacatttgcataatgatgtggagaaagagagaaaggaaaaattgccaaaagaaatagaggaagataaactaaaacgagaagaagaaaaaagagaagctgaaaagagtgaagattcctctggtgctgcaggcctctcaggcttacatcgcacatacagccaggactgtagctttaaaaacagcatgtaccatgttggagattacgtctatgtggaacctgcagaggccaacctacaaccacatatcgtctgtattgaaagactgtgggaggattcagctggtgaaaaatggttgtatggctgttggttttaccgaccaaatgaaacattccacctggctacacgaaaatttctagaaaaagaagtttttaagagtgactattacaacaaagttccagttagtaaaattctaggcaagtgtgtggtcatgtttgtcaaggaatactttaagttatgcccagaaaacttccgagatgaggatgtttttgtctgtgaatcacggtattctgccaaaaccaaatcttttaagaaaattaaactgtggaccatgcccatcagctcagtcaggtttgtccctcgggatgtgcctctgcctgtggttcgcgtggcctctgtatttgcaaatgcagataaaggtgatgatgagaagaatacagacaactcagaggacagtcgagctgaagacaattttaacttggaaaaggaaaaagaagatgtccctgtggaaatgtccaatggtgaaccaggttgccactactttgagcagctccattacaatgacatgtggctgaaggttggcgactgtgtcttcatcaagtcccatggcctggtgcgtcctcgtgtgggcagaattgaaaaagtatgggttcgagatggagctgcatatttttatggccccatcttcattcacccagaagaaacagagcatgagcccacaaaaatgttctacaaaaaagaagtatttctgagtaatctggaagaaacctgccccatgacatgtattctcggaaagtgtgctgtgttgtcattcaaggacttcctctcctgcaggccaactgaaataccagaaaatgacattctgctttgtgagagccgctacaatgagagcgacaagcagatgaagaaattcaaaggattgaagaggttttcactctctgctaaagtggtagatgatgaaatttactacttcagaaaaccaattgttcctcagaaggagccatcacctttgctggaaaagaagatccagttgctagaagctaaatttgccgagttagaaggtggagatgatgatattgaagagatgggagaagaagatagtgaggtcattgaacctccttctctacctcagcttcagacccccctggccagtgagctggacctcatgccctacacacccccacagtctaccccaaagtctgccaaaggcagtgcaaagaaggaaggctccaaacggaaaatcaacatgagtggctacatcctgttcagcagtgagatgagggctgtgattaaggcccaacacccagactactctttcggggagctcagccgcctggtggggacagaatggagaaatcttgagacagccaagaaagcagaatatgaaggcatgatgggtggctatccgccaggccttccacctttgcagggcccagttgatggccttgttagcatgggcagcatgcagccacttcaccctggggggcctccaccccaccatcttccgccaggtgtgcctggcctcccgggcatcccaccaccgggtgtgatgaaccaaggagtggcccctatggtagggactccagcaccaggtggaagtccatatggacaacaggtgggagttttggggcctccagggcagcaggcaccacctccatatcccggcccacatccagctggaccccctgtcatacagcagccaacaacacccatgtttgtagctcccccaccaaagacccagcggcttcttcactcagaggcctacctgaaatacattgaaggactcagtgcggagtccaacagcattagcaagtgggatcagacactggcagctcgaagacgcgacgtccatttgtcgaaagaacaggagagccgcctaccctctcactggctgaaaagcaaaggggcccacaccaccatggcagatgccctctggcgccttcgagatttgatgctccgggacaccctcaacattcgccaagcatacaacctagaaaatgtttaatcacatcattacgtttcttttatatagaagcataaagagttgtggatcagtagccattttagttactgggggtggggggaaggaacaaaggaggataatttttattgcattttactgtacatcacaaggccatttttatatacggacacttttaataagctatttcaatttgtttgttatattaagttgactttatcaaatacacaaagatttttttgcatatgtttccttcgtttaaaaccagtttcataattggttgtatatgtagacttggagttttatctttttacttgttgccatggaactgaaaccattagaggtttttgtcttggcttggggtttttgttttcttggttttgggtttttttatatatatatataaaagaacaaaatgaaaaaaaacacacacacacaagagtttacagattagtttaaattgataatgaaatgtgaagtttgtcctagtttacatcttagagaggggagtatacttgtgtttgtttcatgtgcctgaatatcttaagccactttctgcaaaagctgtttcttacagatgaagtgctttctttgaaaggtggttatttaggttttagatgtttaatagacacagcacatttgctctattaactcagaggctcactacagaaatatgtaatcagtgctgtgcatctgtctgcagctaatgtacctcctggacaccaggaggggaaaaagcactttttcaattgtgctgagttagacatctgtgagttagactatggtgtcagtgatttttgcagaacacgtgcacaaccctgaggtatgtttaatctaggcaggtacgtttaaggatattttgatctatttataatgaattcacaatttatgcctataaatttcagatgatttaaaattttaaacctgttacattgaaaaacattgaagttcgtcttgaagaaagcattaaggtatgcatggaggtgatttatttttaaacataacacctaacctaacatgggtaagagagtatggaactagatatgagctgtataagaagcataattgtgaacaagtagattgattgccttcatatacaagtatgttttagtattccttatttccttattatcagatgtattttttcttttaagtttcaatgttgttataattctcaaccagaaatttaatactttctaaaatattttttaaatttagcttgtgcttttgaattacaggagaagggaatcataatttaataaaacgcttactagaaagaccattacagatcccaaacacttgggtttggtgaccctgtctttcttatatgaccctacaataaacatttgaaggcagcataggatggcagacagtaggaacattgtttcacttggcggcatgtttttgaaacctgctttatagtaactgggtgattgccattgtggtagagcttccactgctgtttataatctgagagagttaatctcagaggatgcttttttccttttaatctgctatgaatcagtacccagatgtttaattactgtacttattaaatcatgagggcaaaagagtgtagaatggaaaaaagtctcttgtatctagatactttaaatatgggaggccctttaacttaattgcctttagtcaaccactggatttgaatttgcatcaagtattttaaataatattgaatttaaaaaaatgtattgcagtagtgtgtcagtaccttattgttaaagtgagtcagataaatcttcaattcctggctatttgggcaattgaatcatcatggactgtataatgcaatcagattattttgtttctagacatccttgaattacaccaaagaacatgaaatttagttgtggttaaattatttatttatttcatgcattcattttatttcccttaaggtctggatgagacttctttggggagcctctaaaaaaatttttcactgggggccacgtgggtcattagaagccagagctctcctccaggctccttcccagtgcctagaggtgctataggaaacatagatccagccaggggcttccctaaagcagtgcagcaccggcccagggcatcactagacaggccctaattaagttttttttaaaaagcctgtgtatttattttagaatcatgtttttctgtatattaacttgggggatatcgttaatatttaggatataagatttgaggtcagccatcttcaaaaaagaaaaaaaaattgactcaagaaagtacaagtaaactatacacctttttttcataagttttaggaactgtagtaatgtggcttagaaagtataatggcctaaatgttttcaaaatgtaagttcctgtggagaagaattgtttatattgcaaacggggggactgaggggaacctgtaggtttaaaacagtatgtttgtcagccaactgatttaaaaggcctttaactgttttggttgttgttttttttttaagccactctccccttcctatgaggaagaattgagaggggcacctatttctgtaaaatccccaaattggtgttgatgattttgagcttgaatgttttcatacctgattaaaacttggtttattctaatttctgtatcatatcatctgaggtttacgtggtaactagtcttataacatgtatgtatcttttttttgttgttcatctaaagctttttaatccaaataaatacagagtttgcaaagtgatttggattaaccagg

SEQ ID NO: 90 - DNA, 1457 bp, Homo sapiens
  source 1..1457: mol_type = genomic DNA
cttccccttcccgcccgctccccttttcccctcagtcgcctcgcgcctgcagtttttggctttcacccccaaccagtgaccaaagacttgaccactcaaagtccagctccccagaacactgctcgacatggacaccggtgtgattgaaggtggattaaatgtcactctcaccatccggctacttatgcatggaaaggaagttggcagtatcatcggaaagaaaggagaatcagttaagaagatgcgcgaggagagtggtgcacgtatcaacatctcagaagggaattgtcctgagagaattatcactttggctggacccactaatgccatcttcaaagcctttgctatgatcattgacaaactggaagaggacataagcagctctatgaccaatagcacagctgccagtagacccccggtcaccctgaggctggtggtccctgctagtcagtgtggctctctcattggaaaaggtggatgcaagatcaaggaaatacgagagagtacaggggctcaggtccaggtggcaggggatatgctacccaactcaactgagcgggccatcactattgctggcattccacaatccatcattgagtgtgtcaaacagatctgcgtggtcatgttggagtcccccccgaagggcgtgaccatcccgtaccggcccaagccgtccagctctccggtcatctttgcaggtggtcaggacaggtacagcacaggcagcgacagtgcgagctttccccacaccaccccgtccatgtgcctcaaccctgacctggagggaccacctctagaggcctataccattcaaggacagtatgccattccacagccagatttgaccaagctgcaccagttggcaatgcaacagtctcattttcccatgacgcatggcaacaccggattcagtggcattgaatccagctctccagaggtgaaaggctattgggcaggtttggatgcatctgctcagactacttctcatgaactcaccattccaaacgatttgattggctgcataatcgggcgtcaaggcgccaaaatcaatgagatccgtcagatgtctggggcgcagatcaaaattgcgaacccagtggaaggatctactgataggcaggttaccatcactggatctgctgccagcattagcctggctcaatatctaatcaatgtcaggctttcctcggagacgggtggcatggggagcagctagaacaatgcagattcatccataatccctttctgctgttcaccaccacccatgatccatctgtgtagtttctgaacagtcagcgattccaggttttaaatagtttgtaaattttcagtttctacacactttatcatccactcgtgattttttaattaaagcgttttaattcctttctctgttcagctgttgatgctgagatccatatttagttttataagcttctccctggtttttttttttt

SEQ ID NO: 91 - DNA, 2114 bp, Homo sapiens
  source 1..2114: mol_type = genomic DNA
acagtttcccttccgctcacctccgcctgagcagtggagaaggcggcactctggtggggctgctccaggcatgcagatcccacaggcgccctggccagtcgtctgggcggtgctacaactgggctggcggccaggatggttcttagactccccagacaggccctggaacccccccaccttctccccagccctgctcgtggtgaccgaaggggacaacgccaccttcacctgcagcttctccaacacatcggagagcttcgtgctaaactggtaccgcatgagccccagcaaccagacggacaagctggccgccttccccgaggaccgcagccagcccggccaggactgccgcttccgtgtcacacaactgcccaacgggcgtgacttccacatgagcgtggtcagggcccggcgcaatgacagcggcacctacctctgtggggccatctccctggcccccaaggcgcagatcaaagagagcctgcgggcagagctcagggtgacagagagaagggcagaagtgcccacagcccaccccagcccctcacccaggccagccggccagttccaaaccctggtggttggtgtcgtgggcggcctgctgggcagcctggtgctgctagtctgggtcctggccgtcatctgctcccgggccgcacgagggacaataggagccaggcgcaccggccagcccctgaaggaggacccctcagccgtgcctgtgttctctgtggactatggggagctggatttccagtggcgagagaagaccccggagccccccgtgccctgtgtccctgagcagacggagtatgccaccattgtctttcctagcggaatgggcacctcatcccccgcccgcaggggctcagctgacggccctcggagtgcccagccactgaggcctgaggatggacactgctcttggcccctctgaccggcttccttggccaccagtgttctgcagaccctccaccatgagcccgggtcagcgcatttcctcaggagaagcaggcagggtgcaggccattgcaggccgtccaggggctgagctgcctgggggcgaccggggctccagcctgcacctgcaccaggcacagccccaccacaggactcatgtctcaatgcccacagtgagcccaggcagcaggtgtcaccgtcccctacagggagggccagatgcagtcactgcttcaggtcctgccagcacagagctgcctgcgtccagctccctgaatctctgctgctgctgctgctgctgctgctgctgcctgcggcccggggctgaaggcgccgtggccctgcctgacgccccggagcctcctgcctgaacttgggggctggttggagatggccttggagcagccaaggtgcccctggcagtggcatcccgaaacgccctggacgcagggcccaagactgggcacaggagtgggaggtacatggggctggggactccccaggagttatctgctccctgcaggcctagagaagtttcagggaaggtcagaagagctcctggctgtggtgggcagggcaggaaacccctccacctttacacatgcccaggcagcacctcaggccctttgtggggcagggaagctgaggcagtaagcgggcaggcagagctggaggcctttcaggcccagccagcactctggcctcctgccgccgcattccaccccagcccctcacaccactcgggagagggacatcctacggtcccaaggtcaggagggcagggctggggttgactcaggcccctcccagctgtggccacctgggtgttgggagggcagaagtgcaggcacctagggccccccatgtgcccaccctgggagctctccttggaacccattcctgaaattatttaaaggggttggccgggctcccaccagggcctgggtgggaaggtacaggcgttcccccggggcctagtacccccgccgtggcctatccactcctcacatccacacactgcacccccactcctggggcagggccaccagcatccaggcggccagcaggcacctgagtggctgggacaagggatcccccttccctgtggttctattatattataattataattaaatatgagagcatgctaagga

SEQ ID NO: 92 - DNA, 2813 bp, Homo sapiens
  source 1..2813: mol_type = genomic DNA
cgcaggaaggccgcctcattggtccgcgctgtcgggcttcggcggcttttctctttagcgctcagggcgctgacccactgctcttcctcttaagaaagtgctccattccttccggcgcccggagctgctggcccaaagggatccggagcgagctagggcagacaccatgaccacccttgatgataagttgctgggggagaaactgcagtactactatagcagcagtgaggatgaggacagtgaccacgaggacaaggaccgaggcagatgtgccccagccagcagttctgtgcctgcagaggctgagctggcaggcgaaggcatctcagttaacacaggcccaaaaggtgtgatcaatgactggcgccgcttcaagcagttggagacagagcagagggaggagcagtgccgggagatggaaaggctgatcaagaagctgtcaatgacttgcaggtcccatctggatgaagaggaggagcaacagaaacagaaagacctccaggagaagatcagtgggaagatgactctgaaggagtttgccataatgaatgaggaccaagatgatgaagagtttctgcagcagtaccggaagcagcgaatggaagagatgcggcagcagcttcacaaggggccccaattcaagcaggtttttgagatctccagtggagaagggtttttagacatgattgataaagaacagaaaagcattgtcatcatggttcatatttatgaggatggcattccagggaccgaagccatgaatggttgcatgatctgccttgccgcagagtacccagctgtcaagttctgcaaggtgaagagctcagttattggcgccagcagtcagttcaccaggaatgcccttcctgccctgctgatctataaggggggtgaattgatcggcaattttgttcgtgttactgaccagctgggggatgatttctttgctgtggaccttgaagcttttctccaggaatttggattactcccagaaaaggaagtcttggtgctgacatctgtgcgtaactctgccacgtgtcacagtgaggatagcgacctggaaatagattgaactgatagtctagttgcatagatttctcattgtttgggttggaatacacgtcattgtttatttttgttcctttgtcttctggcttttcagctgttctttgtagtcccttttattatgcataaaataaagaaattcttagattaaatcagaatgctgaataaccttgtagctagcaataaggtgacttacagttgtataaacaggaagccaggcttttgaactgtttacttaagattctgtggtgtgacatctctgttattgtttccagtcaatatttacaaagcatcctaaagacagggtcttggaaattgtcttcagatgatcttagaggtctctgccaagtctgagagtataattctgtaggtattgtgttatttgcaacgtaaatagtgcattttcttaatcaaatgattgtaaattatatttacttgtaatcagttccatagctttagacggtggttagattttttttttccccaccagggtcttgtttaaaggggtgagccaccgcacccagtcctgaggggtggcctctgctgctggatttcatgtcttcctccagcatgactaagtctggaacagcaggaagggttgatgcttactgacctggtgatgttagaagacaagtagtttatggatttaaacattagagctggagtggggctggaaatctttgtaaaggaagttctttcagtaagatgcccctgcttgtctttgtctcttttttgtttaacaaggtaactttttgtttaacaaggtaactttttgtttaacctagattttttttaaaactttttttttttttcatattggaaaagtaattcatattcagtagaggaaaactgaccaaaacagaagcaaaaataagaaaattaaaataatctctaatcctactacctagaataaaacactattaatattttggtctgtttcctgccaaggtgttttctgtgtatacatggatattttgtttgtttttaaacaaaacgatgggatcattctgaacatactgttctatagtatggtcagctaataatatatcagacctttttttatattattaaatattctacaactttttaaaaatgtctattaatattccatcgtatagatgtgatataatttgcttgatggttgtctcttaaaaagaaagatagcaaatactttttttaaattacaaaagtgatagatgttcattgtagaaaatgtaataaacactgttaagacttaaaagccatataattccaccaaccaaaattaatcccttttgtcatatttctagtcatttttatagcctttttttctatgtatttataataattatcatttgcgtttttttcctttttttaactttaaaaatgtatattctagggtcaggggaaatgtaatctggaattaaatattagccttaaaattcacaattttgattttcctggcttttcaggaattgactaactgtaaaagagtcttgaaagtatttagtcaacaaacagagtgcattttttttttttttgactaagaaagctcgttgtagtagaaagggtggaatgtattgaaaattattagaagcagggaagtattgttagtctagcttatttcctttcagtcttttttcaatatttttataaacattgagtacttactgaatttagttctgtgctcttccttatttagtgttgtatcataaatactttgatgtttcaaacattctaaataaataattttcagtggcttcataata

SEQ ID NO: 93 - DNA, 3310 bp, Homo sapiens
  source 1..3310: mol_type = genomic DNA
actgaggcgtggcgtctgctggggcacctgaaggagacttgggggcacccgcgtcgtgcctcctgggttgtgaggagtcgccgctgccgccactgcctgtgcttcatgaggaagatgctcgccgccgtctcccgcgtgctgtctggcgcttctcagaagccggcaagcagagtgctggtagcatcccgtaattttgcaaatgatgctacatttgaaattaagaaatgtgaccttcaccggctggaagaaggccctcctgtcacaacagtgctcaccagggaggatgggctcaaatactacaggatgatgcagactgtacgccgaatggagttgaaagcagatcagctgtataaacagaaaattattcgtggtttctgtcacttgtgtgatggtcaggaagcttgctgtgtgggcctggaggccggcatcaaccccacagaccatctcatcacagcctaccgggctcacggctttactttcacccggggcctttccgtccgagaaattctcgcagagcttacaggacgaaaaggaggttgtgctaaagggaaaggaggatcgatgcacatgtatgccaagaacttctacgggggcaatggcatcgtgggagcgcaggtgcccctgggcgctgggattgctctagcctgtaagtataatggaaaagatgaggtctgcctgactttatatggcgatggtgctgctaaccagggccagatattcgaagcttacaacatggcagctttgtggaaattaccttgtattttcatctgtgagaataatcgctatggaatgggaacgtctgttgagagagcggcagccagcactgattactacaagagaggcgatttcattcctgggctgagagtggatggaatggatatcctgtgcgtccgagaggcaacaaggtttgctgctgcctattgtagatctgggaaggggcccatcctgatggagctgcagacttaccgttaccacggacacagtatgagtgaccctggagtcagttaccgtacacgagaagaaattcaggaagtaagaagtaagagtgaccctattatgcttctcaaggacaggatggtgaacagcaatcttgccagtgtggaagaactaaaggaaattgatgtggaagtgaggaaggagattgaggatgctgcccagtttgccacggccgatcctgagccacctttggaagagctgggctaccacatctactccagcgacccaccttttgaagttcgtggtgccaatcagtggatcaagtttaagtcagtcagttaaggggaggagaaggagaggttataccttcagggggctaccagacagtgttctcaacttggttaaggaggaagaaaacccagtcaatgaaattcaatgaaattcttggaaacttccattaagtgtgtagattgagcaggtagtaattgcatgcagtttgtacattagtgcattaaaagatgaattattgagtgcttaaagattatttttgacttaaaatagtatactttgaacaaatactctaattatgaaaaggaagaacaattccttgtatgcctgtttcccctgcccccagccacctttttgggaggagaccattatggcggggcccctcacagcattctaccaaccatagcacccaccccgagcagcgctggtgctgcagcctgttcgcgctgaccatttctctacaagatacaatatttattatcaggcaagaggacagttccattttaaaataagacttttgtaatcattccaattttgtaatcatttcaaaggccacataacttagttttctctacttacacattcagtataaatatgaagctattttctgttcatatcaaacattaactacaaggcacattcgtatcagttttgtgtttctcaaattgaagtaccataccagttctgaggcagtgtcccagcttccatgtttgttaaataccccttgtttgtttcaccattccagcaagtgctgaagggtgtactttttttgagacagggtcgggctctgttgcccaggctggagtgcagtggtgtgatcatggctcactgcagcctccacacctcctgggctcaagcaatcctcccacctcagcctcctgcatagctgggactacaagtgaatttcctaatattccgggaggtcaaaaccaaggctcactgttttcacaatacacacagttctatgtttataaataacaggtttcaaaagaaactcaggacagtatttaaaacaagttcttaaactattaattgaacaatggcatttttaaatatgtaaacacagcggaattcgtgtatacactaacagaagctttaacaaaacatgtagcgtggtgggacactctgccacagcttagctgattggtatcaagccttgtctttggtttctgaggcctcctgagcccttctgtactgggagaccgcactccagagtctgcagaggagaccacccctgggaaacaaacacagctgtcttcagagtcagtgcttcaagccaacagagcttaaaactgcagtccctaatttaaaaacctaatgaaaataaaaacattctcctcacatatggaggtgacgctcgtgtcccagcagtagtaggacatggccttagaggtacgtacctgcagagagctggctatttcaaatgactcgggaacaagaaggcaggctgcagtttaaagaagggggtgggtccagcgtgcaggcacgcttgccatgtgcctccacccactcccagccaggcattaatggcaggagattggccagctcttctctgtcacattcctatttctgacttctgcctggctttcagtttctgccccaccttggctttttcccagcttgaacctaatagaactccagagtttggggggaggcccagccctttgttttctgctcttgaagcatattcacacataaaaagttgtattctcttatacaaactgttttgaggctcttaccgtagtcgaaggtatcttagatcttccttagtgatctcattaagaatatccgaaagtgtataaccctcttcaacaatctgaaacaaagatcagatccttaagagctgagcagctgtgtaacaacagcataagaatttctttgttgtaaatttaccttttcaattgtctttgcatcagctccttgcagccgcaaccagtctataagctctttatctgttctctgcccgtaggggcctgctgggttctctgtaatacctgtaacgattggcaatttgttatatattagtctaaccataaaactcttcaaaagtaaccagttggattaataaatgattccagaatgtaaa

SEQ ID NO: 94 - DNA, 1527 bp, Homo sapiens
  source 1..1527: mol_type = genomic DNA
cccctctgttgtcgtttggcagcggatagaggacacgaccaagatggcggcggtgtctggcttggtgcggagaccccttcgggaggtctccgggctgctgaagaggcgctttcactggaccgcgccggctgcgctgcaggtgacagttcgtgatgctataaatcagggtatggatgaggagctggaaagagatgagaaggtatttctgcttggagaagaagttgcccagtatgatggggcatacaaggttagtcgagggctgtggaagaaatatggagacaagaggattattgacactcccatatcagagatgggctttgctggaattgctgtaggtgcagctatggctgggttgcggcccatttgtgaatttatgaccttcaatttctccatgcaagccattgaccaggttataaactcagctgccaagacctactacatgtctggtggccttcagcctgtgcctatagtcttcagagggcccaatggtgcctcagcaggtgtagctgcccagcactcacagtgctttgctgcctggtatgggcactgcccaggcttaaaggtggtcagtccctggaattcagaggatgctaaaggacttattaaatcagccattcgggataacaatccagtggtggtgctagagaatgaattgatgtatggggttccttttgaatttcctccggaagctcagtcaaaagattttctgattcctattggaaaagccaaaatagaaaggcaaggaacacatataactgtggtttcccattcaagacctgtgggccactgcttagaagctgcagcagtgctatctaaagaaggagttgaatgtgaggtgataaatatgcgtaccattagaccaatggacatggaaaccatagaagccagtgtcatgaagacaaatcatcttgtaactgtggaaggaggctggccacagtttggagtaggagctgaaatctgtgccaggatcatggaaggtcctgcgttcaatttcctggatgctcctgctgttcgtgtcactggtgctgatgtccctatgccttatgcaaagattctagaggacaactctatacctcaggtcaaagacatcatatttgcaataaagaaaacattaaatatttagtttggacttgaatatcaagtcgttgaaatttatttgaaatacttgctggcactgcacctggatttgtactgcaagacctgactattcataacggaaaacgatttctaaagcaacagcaggtatttttgtacagggaagtttaaatgtgtttgtgtatggaaaactctccactctcctcccctagatgccatgcttccttttgtctgttacggttgccatgttctttgaataacaaattatataacattttatcctctctcaccacaaggacaaagtatggatgtggcagagtcctcatgaaagatgtatccaaacaagataacttatatgtataaaattaaagcatataatatacatttactgttagtttgttttgataaggaataaaggaatttctaacatga

SEQ ID NO: 95 - DNA, 4470 bp, Homo sapiens
  source 1..4470: mol_type = genomic DNA
tcaggggtaggagcgggagccgagaggaggcggaggagatggcgtcccagccgccacctccccccaaaccctgggagacccgccgaattccgggagccggaccgggaccaggaccgggccccactttccaatctgctgatttgggtcctactttaatgacaagacctggacaaccagcacttaccagagtgcccccacctattcttccaaggccatcacagcagacaggaagtagcagtgtgaacacttttagacctgcttacagttcattttcttctggatatggtgcctatggaaattcattttatggaggctatagtccttatagttatggatataatgggctgggctacaaccgcctccgtgtagatgatcttccacccagtagatttgttcagcaagctgaagaaagcagcaggggtgcatttcagtccattgaaagtattgtgcatgcatttgcctctgtcagtatgatgatggatgctaccttttcagctgtctataacagtttcagggctgtattggatgtagcaaatcacttttcccgattgaaaatacactttacaaaagtgttttcagcttttgcattggttaggactatacggtatctttacagacggctacagcggatgttaggtttaagaagaggctctgagaatgaagacctctgggcagagagtgaaggaactgtggcatgccttggtgctgaggaccgagcagctacctcagcaaaatcttggccaatattcttgttctttgctgttatccttggtggtccttacctcatttggaaactattgtctactcacagtgatgaagtaacagacagcatcaactgggcaagtggtgaggatgaccatgtagttgccagagcagaatatgattttgctgccgtatctgaagaagaaatttctttccgggctggtgatatgctgaacttagctctcaaagaacaacaacccaaagtgcgtggttggcttctggctagccttgatggccaaacaacaggacttatacctgcgaattatgtcaaaattcttggcaaaagaaaaggtaggaaaacggtggaatcaagtaaagtttccaagcagcaacaatcttttaccaacccaacactaactaaaggagccacggttgctgattctttggatgaacaggaagctgcctttgaatctgtttttgttgaaactaataaggttccagttgcacctgattccattgggaaagatggagaaaagcaagatctttgatatctttcatgtttgcctgcagttgaacaatactttagagtactttttaaaattatttctcacaaagaaatgaatgtacaatccaatgaaaacatttgttattggctatttcaggtgttttgctgctagaaattattaaagttacacactagtatgttggtctggtgacctggttacattttattatacacattattggaccataaggacatttgtttcacctagattttaagattatggagactgctgtcatttttatcttatttaaatctctaggtttattggaagagtaagattgatgaactatagcatgcacagtttggtacagtagagatcattaatacttttaaaagttctgcattaattgacttggaatccttagaaatggagtggtgacatgtcagtatgagaacaggcaaaaggtaaatttttttttttttttacaaccttaagtaatctcaataataaaattttctgatctgtattatatccagtgttgggtttatattttcacccacaaacaactgacactgctatcttttactgtatttttaaaaatttaatttgaaaaggtcacccagaagcattctgaaggaaatggttctagaattatagagtatgtagccctaatagttttccctcctagcaaaaagtctgaaatttatctttcttacaaactgttccatttcttctaaggatcccttaattatttatctctttaagccaggcatggtggctcacgcctgtaatcccagcactttgggaggctgaggcgggcagatcacctgaggttgggagttcaagaccaccctgaccaacatggagaaaccccatctttacgaaaaatacaaaattagctaggtgtggtggcacatgcctgtaatcccagctactcgggaggctgaggcaggagaattgcttgaaccccaggaggcggaggttacgctgagccggagatctcgccattgcacttcagcctgggcaacaaaagcgaaactccatctcaaaaaataaaattatttatttctttaaaatatgactagttttcatactgggtgaatcagaagtatatgaaaggtatactttcttttcctacaacaaatacttgagttcttttgagtttgcacttaatgatataatcagttataatagtaatttttaatattttcatagattgtttgcttctaccttgtgtaattttttaaattccatatttaggatgctctgtaaatattgaaaatgtgtcacattggatacatttttcttttaggtttagtttttactactgagacttatttatagtcttagtgctctattgccatttagaatatgataatcctcatgcctttaatctcagcactttgggaggccaaggcgggcggatcacctgcggtcaggagtttgagaccagcctggccaacacggtgaaaccctgtctctactaaaaatacgaaaattagctgggtgcagtggcgtgcacctgtagtcccagctactcaggaggctgaggcaggagaatcacttgaacccgggaggcagaggttgcagggagctgagatcatgccactgcactccagcctaggggacagagcaagactctgtctcaaaacaaacaaacaaaaaataataatacgataatgctatttgacgtgttttttggtttataatgattttaaatgcagttaactttcagtacactgaatatttccccagaaaattggaaacttcatatacttggctacgaacatactacagagtaatactatcaggaatacaggtgtataagaatacatttatagatattgttgaaaactttgaactgtttgataaaaattgtgatttagtattttttcttttgtctttttttgaaacggagtctcactctgtcgcccaggctggagtccagtggcgcgatctcggctcactgcaagctccgcctcccgggttcacgccattctcctgcctcagcctcccgagtagctgggactacaggcgcctgccaccaggcccggctaattttttttgtatttttagtagagacggggtttcaccgtgttacccaggatggtctccatctcctgacctcgtgatgagcccgcttcggtctcccaaagtgttgggattacaggcgtgagccaccgcacccagcgatttagtatttttttctaatagactatgttcaacaaataagtaattctcgaatagttcagattaaaacatacaggaaccaagtacatacccagcatagaagaactttactaaaggcttcttggaaagcccttttttgaaacgacagtatcgtaagtaacatatcatttataatagaaatcttgacccagtgcagaaaaataaatatagtaaaatttatttatctttggccagttttccaacacccaggtattagccttgaagttgaagagataaggtttcttgtatattatttttcatttgtgttctacaattaaaggttctgctttgatttgtcagataatttatagaaattttgttctcaaaacaaatgtttgataaaacagattattaaatttggggttgagatgtctaaattgaatgctagaagtaaagtagaagtgaccactattaaagatgtatagggagaagagtacagcacaaagtgataaaatagtgacacttttgtaggggtgtttattgtttggttaagtctgctaaattacggtatgcattatctggtgactatttgtgcctgaaaattcgttttgtattaaaattctggagaaggaattcaggactagaataaagagaaattttgtaaccttttttatcatgacagttttagaataatttttttagctgagattaaatgttcaaggctccaatattatttttaggaacttatttaaggagtgctactttacagaaattactaacacaccaaaacattattaattaaataaaatataagtttacaataataaaacatgtttcttttaatttttctgattatattttatgagttcagaaaggaaatggtaaaagaactatacattttcatgttttaacattttatgtacgtacttgattctgtctgtgtcataattacacatttacttgaacacagctatcctttatcttgtgctttctttaatagaaaaatgaacagaaactgaatgcagttaaatttttatttttagtaggttgtgaagttacttttactggagaaataaaaatatgttaaacttga

SEQ ID NO: 96 - DNA, 5164 bp, Homo sapiens
  source 1..5164: mol_type = genomic DNA
gggaagccagacggttaacacagacaaagtgctgccgtgacactcggccctccagtgttgcggagaggcaagagcagcgaccgcggcacctgtccgcccggagctgggacgcgggcgcccgggcggccggacgaagcgaggagggaccgccgaggtgcgcgtctgtgcggctcagcctggcgggggacgcggggagaatgtggactgggtagagatgaacgagacttttctcagatgttggatatttgcttggaaaaacgtgtgggtacgaccttggctgcccccaagtgtaactccagcactgtgaggtttcagggattggcagaggggaccaaggggaccatgaaaatggacatggaggatgcggatatgactctgtggacagaggctgagtttgaagagaagtgtacatacattgtgaacgaccacccctgggattctggtgctgatggcggtacttcggttcaggcggaggcatccttaccaaggaatctgcttttcaagtatgccaccaacagtgaagaggttattggagtgatgagtaaagaatacataccaaagggcacacgttttggacccctaataggtgaaatctacaccaatgacacagttcctaagaacgccaacaggaaatatttttggaggatctattccagaggggagcttcaccacttcattgacggctttaatgaagagaaaagcaactggatgcgctatgtgaatccagcacactctccccgggagcaaaacctggctgcgtgtcagaacgggatgaacatctacttctacaccattaagcccatccctgccaaccaggaacttcttgtgtggtattgtcgggactttgcagaaaggcttcactacccttatcccggagagctgacaatgatgaatctcacacaaacacagagcagtctaaagcaaccgagcactgagaaaaatgaactctgcccaaagaatgtcccaaagagagagtacagcgtgaaagaaatcctaaaattggactccaacccctccaaaggaaaggacctctaccgttctaacatttcacccctcacatcagaaaaggacctcgatgactttagaagacgtgggagccccgaaatgcccttctaccctcgggtcgtttaccccatccgggcccctctgccagaagactttttgaaagcttccctggcctacgggatcgagagacccacgtacatcactcgctcccccattccatcctccaccactccaagcccctctgcaagaagcagccccgaccaaagcctcaagagctccagccctcacagcagccctgggaatacggtgtcccctgtgggccccggctctcaagagcaccgggactcctacgcttacttgaacgcgtcctacggcacggaaggtttgggctcctaccctggctacgcacccctgccccacctcccgccagctttcatcccctcgtacaacgctcactaccccaagttcctcttgcccccctacggcatgaattgtaatggcctgagcgctgtgagcagcatgaatggcatcaacaactttggcctcttcccgaggctgtgccctgtctacagcaatctcctcggtgggggcagcctgccccaccccatgctcaaccccacttctctcccgagctcgctgccctcagatggagcccggaggttgctccagccggagcatcccagggaggtgcttgtcccggcgccccacagtgccttctcctttaccggggccgccgccagcatgaaggacaaggcctgtagccccacaagcgggtctcccacggcgggaacagccgccacggcagaacatgtggtgcagcccaaagctacctcagcagcgatggcagcccccagcagcgacgaagccatgaatctcattaaaaacaaaagaaacatgaccggctacaagacccttccctacccgctgaagaagcagaacggcaagatcaagtacgaatgcaacgtttgcgccaagactttcggccagctctccaatctgaaggtccacctgagagtgcacagtggagaacggcctttcaaatgtcagacttgcaacaagggctttactcagctcgcccacctgcagaaacactacctggtacacacgggagaaaagccacatgaatgccaggtctgccacaagagatttagcagcaccagcaatctcaagacccacctgcgactccattctggagagaaaccataccaatgcaaggtgtgccctgccaagttcacccagtttgtgcacctgaaactgcacaagcgtctgcacacccgggagcggccccacaagtgctcccagtgccacaagaactacatccatctctgtagcctcaaggttcacctgaaagggaactgcgctgcggccccggcgcctgggctgcccttggaagatctgacccgaatcaatgaagaaatcgagaagtttgacatcagtgacaatgctgaccggctcgaggacgtggaggatgacatcagtgtgatctctgtagtggagaaggaaattctggccgtggtcagaaaagagaaagaagaaactggcctgaaagtgtctttgcaaagaaacatggggaatggactcctctcctcagggtgcagcctttatgagtcatcagatctacccctcatgaagttgcctcccagcaacccactacctctggtacctgtaaaggtcaaacaagaaacagttgaaccaatggatccttaagattttcagaaaacacttattttgtttcttaagttatgacttggtgagtcagggtgcctgtaggaagtggcttgtacataatcccagctctgcaaagctctctcgacagcaaatggtttcccctcacctctggaattaaagaaggaactccaaagttactgaaatctcagggcatgaacaaggcaaaggccatatatatatatatatatatatctgtatacatattatatatacttatttacacctgtgtctatatatttgcccctgtgtattttgaatatttgtgtggacatgtttgcatagccttcccattactaagactattacctagtcataattattttttcaatgataatccttcataatttattatacaatttatcattcagaaagcaataattaaaaaagtttacaatgactggaaagattccttgtaatttgagtataaatgtatttttgtcttgtggccattctttgtagataatttctgcacatctgtataagtacctaagatttagttaaacaaatatatgacttcagtcaacctctctctctaataatggtttgaaaatgaggtttgggtaattgccaatgttggacagttgatgtgttcattcctgggatcctatcatttgaacagcattgtacataacttgggggtatgtgtgcaggattacccaagaataacttaagtagaagaaacaagaaagggaatcttgtatatttttgttgatagttcatgtttttcccccagccacaattttaccggaagggtgacaggaaggctttaccaacctgtctctccctccaaaagagcagaatcctcccaccgccctgccctccccaccgagtcctgtggccattcagagcggccacatgacttttgcatccattgtattatcagaaaatgtgaagaagaaaaaaatgccatgttttaaaaccactgcgaaaatttccccaaagcataggtggctttgtgtgtgtgcgatttgggggcttgagtctgggtggtgttttgttgttggtttttgttgctttttttttttttttttttttaatgtcaaaattgcacaaacatggtgctctaccaggaaggattcgaggtagataggctcaggccacactttaaaaacaaacacacaaacaacaaaaaacgggtattctagtcatcttggggtaaaagcgggtaatgaacattcctatccccaacacatcaattgtattttttctgtaaaactcagattttcctcagtatttgtgtttttacattttatggttaatttaatggaagatgaaagggcattgcaaagttgttcaacaacagttacctcattgagtgtgtccagtagtgcaggaaatgatgtcttatctaatgatttgcttctctagaggagaaaccgagtaaatgtgctccagcaagatagactttgtgttattctatcttttattctgctaagcccaaagattacatgttggtgttcaaagtgtagcaaaaaatgatgtatatttataaatctatttataccactatatcatatgtatatatatttataaccacttaaattgtgagccaagccatgtaaaagatctactttttctaagggcaaaaaaaaaaaaaaaaaaaaaagaacactcctttctgagactttgcttaatacttggtgacctcacaatcacgtcggtatgattgggcacccttgcctactgtaagagaccctaaaaccttggtgcagtggtggggaccacaaaacaaccagggaggaagagatacatcattttttagtattaaggaccatctaagacagctctattttttttttgccactttatgattatgtggtcacacccaagtcacagaaataaaaaactgactttaccgctgcaatttttctgttttcctccttactaaatactgatacattactccaatctattttataattatatttgacattttgttcacatcaactaatgttcacctgtagaagagaacaaatttcgaataatccagggaaacccaagagccttactggtcttctgtaacttccaagactgacagctttttatgtatcagtgtttgataaacacagtccttaactgaaggtaaaccaaagcatcacgttgacattagaccaaatacttttgattcccaactactcgtttgttctttttctccttttgtgctttcccatagtgagaatttttataaagacttcttgcttctctcaccatccatccttctcttttctgcctcttacatgtgaatgttgagcccacaatcaacagtggttttattttttcctctactcaaagttaaaactgaccaaagttactggctttttactttgctagaacaacaaactatcttatgtttacatactggtttacaatgttatttatgtgcaaattgtcaaaatgtaaattaaatataaatgttcatgctttaccaaaa

SEQ ID NO: 97 - DNA, 6654 bp, Homo sapiens
  source 1..6654: mol_type = genomic DNA
gtccacgccgcccgcgccccgcagtcccacccgcaggacccccggccgcgccagggtctcgcctgcgccccccgcgcccgcccgcggactacaagtcccgccatgccccgccgccgccccccggcttccggtgctgcgcagtttccggagcggatcgcaacccggagtccggatccgatcccgctctgcacattccaaaggcaggtgtcagagatggctgaagatgggagcgaagagatcatgttcatctggtgtgaagactgcagccagtaccacgactccgaatgtcccgagctgggcccagtggtcatggtcaaagactcctttgtgttaagcagggcaaggtcatcccttcctcccaacttggagatcagacgactggaagatggagccgagggggtgttcgccatcactcagctcgtcaagcggacacagttcggtccctttgagtccaggagggtcgccaaatgggaaaaggagtctgcatttcccctgaaggtgttccagaaggacgggcaccccgtgtgcttcgacacctccaacgaggatgactgcaactggatgatgctggtgcggccagcggcggaggccgagcaccagaacctgacggcctaccagcacggcagcgacgtgtacttcaccacctccagagacatccccccgggtaccgagctgcgcgtgtggtatgcggccttctatgccaagaagatggacaagcccatgctgaagcaggccggctctggcgtccacgctgcaggcaccccagaaaacagcgcccccgtggagtcggagcccagccagtgggcgtgtaaagtgtgttctgccaccttcctggagctgcagctcctcaatgaacatctgttgggccacttagaacaagccaaaagccttcctccaggcagccaaagcgaggcagcagctcccgagaaggagcaggacacaccccggggggaaccccctgcagtgcccgagagcgagaatgttgccaccaaagaacagaagaaaaagcctcgaagggggagaaaacccaaagtgtccaaagctgagcagcctctagtcatcgtggaagacaaggaacccacagagcaagtggcagagatcattaccgaggtccctccggatgagcctgtgagtgcaacgccagatgagcggatcatggagctggttctggggaagctggccaccaccaccactgacaccagctcggttccaaagttcacccatcatcagaataacaccatcacgctcaagaggagcttaattctctcaagcagacacggcatccggcgcaagctcatcaaacagctcggggagcacaagcgggtttaccagtgcaatatctgcagcaagatcttccagaacagcagcaacctgagcaggcacgtgcgctcgcatggtgacaagctgtttaagtgcgaagagtgtgcaaaattgttcagccgcaaagagagcctaaagcagcacgtttcctacaagcacagcaggaacgaggtggacggcgagtacaggtaccgctgcggcacttgtgagaagaccttccgcatcgagagcgcgctggagttccacaactgcaggacagatgacaagacgttccaatgtgagatgtgtttcagattcttctccaccaacagcaacctctccaagcacaagaagaagcacggcgacaagaagtttgcctgtgaggtctgcagcaagatgttctaccgcaaggacgtcatgctggaccaccagcgccggcacctggaaggagtgcggcgagtgaagcgagaggacctggaggccggtggggagaacctggtccgttacaagaaggagccttccgggtgcccggtgtgtggcaaggtgttctcctgccggagcaatatgaacaagcacctgctcacccacggcgacaagaagtacacctgcgagatctgcgggcgcaagttcttccgcgtggatgtgctcagggaccacatccatgtccacttcaaggacatcgcgttgatggatgaccaccagagggaagagtttatcggcaagatcgggatctcctcggaagaaaacgatgacaattctgacgagagcgcagactcggagcctcacaagtacagctgcaagcggtgccagctcaccttcggccgggggaaggagtacctgaagcacatcatggaggtgcacaaggagaagggctatggctgcagcatctgcaaccggcgctttgcactgaaggccacctaccacgcccacatggtcatccaccgtgaaaacctgccggaccccaacgtgcagaagtacatccacccctgcgagatctgcgggcggatcttcaacagcatcgggaacctggagcgccacaagctcatccacacaggtgtgaagagccacgcctgcgagcagtgtgggaagtcctttgccaggaaggacatgctgaaggagcacatgcgtgtgcacgacaatgtccgcgagtacctgtgtgccgagtgtgggaaaggcatgaagaccaagcacgcgctgcgccaccacatgaagctgcacaagggcatcaaggagtacgagtgcaaggagtgccaccgcaggttcgcgcagaaggtcaacatgctcaagcactgcaagcggcacacggggattaaagatttcatgtgtgaattgtgtgggaagacattcagcgagaggaacaccatggagacccacaagctcatccacacagtgggcaagcagtggacgtgctccgtgtgcgacaagaagtacgtgaccgagtacatgctgcagaagcacgttcagctcacacacgacaaggtggaggcgcagagctgccagctgtgcgggaccaaggtgtccaccagggcctccatgagccgacacatgcggcgcaagcaccccgaggtgctcgcggtgaggatcgatgacctggaccacctcccggagaccaccaccatcgacgcctcctccattggcatcgtccagcctgagctgactctggagcaggaggatttggccgaagggaagcacgggaaagctgccaagcgaagtcacaagagaaagcagaagccagaagaggaggcgggtgctccggtgcccgaggacgccaccttcagcgaatactcagagaaagagacggagttcacaggcagtgtaggcgacgagaccaattccgcagtacagagcattcagcaggtagtggtgaccctgggtgacccaaatgtgaccacaccatcgagctcagtcggcttaaccaacatcaccgtgacccccatcaccactgcggccgcgactcagtttaccaatctccagccggtggccgtggggcaccttaccacccctgaacgccagttacagctggacaactcaatcctgaccgtgacctttgataccgtcagcggctctgccatgttgcacaaccgccaaaatgacgtccagatccacccccagccggaagcctcgaacccacagtctgtggcccatttcatcaacctgacgaccctggtcaactccatcacgcccctggggagccagcttagtgaccagcacccgctcacgtggcgggcagtgccccagactgacgtcttgccaccctcgcagccgcaggcacccccacagcaggcggcccagccccaggtgcaggcggagcagcagcagcagcagatgtacagctactgagctgcgttccgggagactcggggcaagaactgcagagggatgtttgggatttgtttagatgtgtttgctggataccaaacaaacaaaaagtcatacattgcaatgtaaggttgacttagctttgcagagtatctccagatcccccgccagcaaccattacggtctgtcagcttaactctagaagggacctctggcaggccagagttttaaactggatggggctccacaccatgccttaccaaggcagtaagtcctgggccggggccgcatctgcctccccttacagaaccagtgttcgcccgacacagggttcgggaaagtgaagctgagagagaagcaggattttaagaggcaggagataagttattaggaacacaaatggttcattttcttttttcttttagagctcggttcctatgagaacacagacagtattcacaggtggcagcaggcagcagggaacattttctcctcacttctggatttttttgcaagcgagcacatagaagttaaagtaacgtgtattctctttgaactaggagtggagtcggttcttatacaactatgggctgaaaccatgaggcgtgctgagccgcacctgatcctgcaaccttcgaggtcatcacggtcatcatgtgcaaggggtcacgtgaggtcactgactccagctcaaaacgcatcttagtaatatccatgaatcgatttccaatagagtttttttccttttttttttttaactttatttcaaacatacattatgtgttcaagactgttatggccaatattgtgttttagttttatgttaacatgataaagtcatgtgcactgtaggaccatctgtccctgtccacccttcacagctgcccagatgcagagggtcgcgcggctgtgtgtgaggagtgagcctccctgctgcccccaggggctcctccgggttgtctcaggattctctgcaatccaaatgtatccattctggctgaagcccagccagaatcccgagtggaagaaacgggggaaaagtcatattttccttctgtttaaacttcaattccaaaggttggtgtatttcatgaccagttttctataaaaatattgaatgagtttggctctttacaatggaaaagtgtaggtatttctgaaacacagagaaaatgctatttcctgccaggtggtaatgaaagcagagaggttagttcactaatagaagcattaattgcccctaaaactgaatgtgcggtgaacagccaggtctgcgtgtgcggggacacgtgctgtcacgtctgtgtaccagtttcgggggcaggggccagggttgggggaggcacccagccctcctgctgcccacgacaagaaacactgagaggtgtggggagaagtttgctcttaactttcctggtactctgtttgtggccacagtgagaggacaaacctgccttaaggtgtcctgctttgccagttatcccagatcctgcactcactgggagtccatcttgaggaaacactggcatggctgagtaattgatcaggagcagtcctgatgttgccagcagaacaaaggatgattgtgtttttcaaaacgcaactttctcagcacttcactccaaacagcagacttttgaggacagggctggaatttgttttgtgcaatatatgccttcatgaactaaggaatgttcatccccaggcagcatgcaggagggtctgtggggctcacctcctcaccttacccaccatcactcgcgcctagctctcacctctcagttgaatgaatagtgggagatcatttgacttttaatttatgagaattattttatgttatttatgtatataattaactgttttatacatagtagtctcatcaaatgaattcgggcttggggtgatattgtctccattctccagatacaagtgctccaggcatccatggaatcagcaggagaccagggctcctaagatatatttttaaaaatcagtatcgatttctttttgcctttgcagaatctaaagggcaaatgacctcgcagagactcccaacgggctttgggctcatgacgaaacacccactagcattgatcttttattcctcttccctataaaataaaggccttggaaatcacaattttatttttttaaagaagttgttttagtgcctagagtaagaccgcatcaaatgttgttaaagaacctaatttagattgtgtggtatataccactgtttatctcaatacacagacacctcttacttcttgttataagtgagaactctaaagaaaaatcaaactcccaagttttctgtaaacatacgtggtcttaatagggtcactgtctgaggcaaaatgggttgtcttaaagcaattgctacaaatttgcatcaaagaaactagatagcaaaatacaacaaccatgtaccacccaggcagaagagtcctcacctatacgcagttctgcatattgatcatcatgacaggaagtatttcgttttttaactgatcccaggtgcacagatgtattcataaaggaagacattagatccagccattgtggccaccaggctctgtggacccatctcagtggagaattcgttttggacccgtggctccgtgcagctgtggactcgagtgccatccactggtgtgagtcttgcggggaggccacaggtacagctgctccccgtgaatcctggtctgtgggttgagaaggggctcgggcctctggaatgctctagcgtgtgacgtgttctcaggaaaacgttctgtgccaagtgccgcctcgctgtgtccggcatgggactgcgctggagggtccggcgtggaaggcagacctcctgtacctctatcgttcccatttgtggcatccaaaggcggaaggctcatggcttccccactagaggcggcgtcttgggctttcccattggattgtgaaaggcattaagactgtttggagatgttggctgtatttcctgtcacatcaggttgtatgatgacgaataaaaggtgctgtgacccgtgttttcaa

SEQ ID NO: 98 - DNA, 1706 bp, Homo sapiens
  source 1..1706: mol_type = genomic DNA
cgcgctcgggcgccgagtctgcgcgctgacgtccgacgctccaggtactttccccacggccgacagggcttggcgtgggggcggggcgcggcgcgcagcgcgcatgcgccgcagcgccagcgctctccccggatcgtgcggggcctgagcctctccgccggcgcaggctctgctcgcgccagctcgctcccgcagccatgcccaccaccatcgagcgggagttcgaagagttggatactcagcgtcgctggcagccgctgtacttggaaattcgaaatgagtcccatgactatcctcatagagtggccaagtttccagaaaacagaaatcgaaacagatacagagatgtaagcccatatgatcacagtcgtgttaaactgcaaaatgctgagaatgattatattaatgccagtttagttgacatagaagaggcacaaaggagttacatcttaacacagggtccacttcctaacacatgctgccatttctggcttatggtttggcagcagaagaccaaagcagttgtcatgctgaaccgcattgtggagaaagaatcggttaaatgtgcacagtactggccaacagatgaccaagagatgctgtttaaagaaacaggattcagtgtgaagctcttgtcagaagatgtgaagtcgtattatacagtacatctactacaattagaaaatatcaatagtggtgaaaccagaacaatatctcactttcattatactacctggccagattttggagtccctgaatcaccagcttcatttctcaatttcttgtttaaagtgagagaatctggctccttgaaccctgaccatgggcctgcggtgatccactgtagtgcaggcattgggcgctctggcaccttctctctggtagacacttgtcttgttttgatggaaaaaggagatgatattaacataaaacaagtgttactgaacatgagaaaataccgaatgggtcttattcagaccccagatcaactgagattctcatacatggctataatagaaggagcaaaatgtataaagggagattctagtatacagaaacgatggaaagaactttctaaggaagacttatctcctgcctttgatcattcaccaaacaaaataatgactgaaaaatacaatgggaacagaataggtctagaagaagaaaaactgacaggtgaccgatgtacaggactttcctctaaaatgcaagatacaatggaggagaacagtgagagtgctctacggaaacgtattcgagaggacagaaaggccaccacagctcagaaggtgcagcagatgaaacagaggctaaatgagaatgaacgaaaaagaaaaaggccaagattgacagacacctaatattcatgacttgagaatattctgcagctataaattttgaaccattgatgtgcaaagcaagacctgaagcccactccggaaactaaagtgaggctcgctaaccctctagattgcctcacagttgtttgtttacaaagtaaactttacatccaggggatgaagagcacccaccagcagaagactttgcagaacctttaattggatgtgttaagtgtttttaatgagtgtatgaaatgtagaaagatgtacaagaaataaattaggggagattactttgtattgtactgccattcctactgtatttttatactttttggcagcattaaatatttttgttaaatagtc

SEQ ID NO: 99 - DNA, 3041 bp, Homo sapiens
  source 1..3041: mol_type = genomic DNA
ctcgctatggccgctgccatcgccccgcgcccctgagccgcggccccctggacggctcctctcccgggaccccgcaccctgatgccgagcagcaccagggcgccgggttagggcagacgctgtgctcgctggcaccccgaacgggttgcttcccccgctgcgagcatcacaggacatggccccctcagccacctagctggggcccatctaggagtggcatcttttttggtgccctgaaggccagctctggaccttcccaggaaaagtgccagctcacagaactgcttgaccaaaggaccggctcttgagacatcccccaacccacctggcccccagctagggtgggggctccaggagactgagattagcctgccctctttggacagcagctccaggacagggcgggtgggctgaccacccaaaccccatctgggcccaggccccatgccccgaggaggggtggtctgaagcccaccagagccccctgccagactgtctgcctcccttctgactgtggccgcttggcatggccagcaacagcagctcctgcccgacacctgggggcgggcacctcaatgggtacccggtgcctccctacgccttcttcttcccccctatgctgggtggactctccccgccaggcgctctgaccactctccagcaccagcttccagttagtggatatagcacaccatccccagccactgtgagaaacgaccgaaacaagaagaagaaggaggtgcccaagcccgagtgctctgagagctacacgctgacgccggaggtgggggagctcattgagaaggtgcgcaaagcgcaccaggaaaccttccctgccctctgccagctgggcaaatacactacgaacaacagctcagaacaacgtgtctctctggacattgacctctgggacaagttcagtgaactctccaccaagtgcatcattaagactgtggagttcgccaagcagctgcccggcttcaccaccctcaccatcgccgaccagatcaccctcctcaaggctgcctgcctggacatcctgatcctgcggatctgcacgcggtacacgcccgagcaggacaccatgaccttctcggacgggctgaccctgaaccggacccagatgcacaacgctggcttcggccccctcaccgacctggtctttgccttcgccaaccagctgctgcccctggagatggatgatgcggagacggggctgctcagcgccatctgcctcatctgcggagaccgccaggacctggagcagccggaccgggtggacatgctgcaggagccgctgctggaggcgctaaaggtctacgtgcggaagcggaggcccagccgcccccacatgttccccaagatgctaatgaagattactgacctgcgaagcatcagcgccaagggggctgagcgggtgatcacgctgaagatggagatcccgggctccatgccgcctctcatccaggaaatgttggagaactcagagggcctggacactctgagcggacagccggggggtggggggcgggacgggggtggcctggcccccccgccaggcagctgtagccccagcctcagccccagctccaacagaagcagcccggccacccactccccgtgaccgcccacgccacatggacacagccctcgccctccgccccggcttttctctgcctttctaccgaccatgtgaccccgcaccagccctgcccccacctgccctcccgggcagtactggggaccttccctgggggacggggagggaggaggcagcgactccttggacagaggcctgggccctcagtggactgcctgctcccacagcctgggctgacgtcagaggccgaggccaggaactgagtgaggcccctggtcctgggtctcaggatgggtcctgggggcctcgtgttcatcaagacacccctctgcccagctcaccacatcttcatcaccagcaaacgccaggacttggctcccccatcctcagaactcacaagccattgctccccagctggggaacctcaacctcccccctgcctcggttggtgacagagggggtgggacaggggcggggggttccccctgtacataccctgccataccaaccccaggtattaattctcgctggttttgtttttattttaatttttttgttttgatttttttaataagaattttcattttaagcacatttatactgaaggaatttgtgctgtgtattggggggagctggatccagagctggagggggtgggtccgggggagggagtggctcggaaggggcccccactctcctttcatgtccctgtgccccccagttctcctcctcagccttttcctcctcagttttctctttaaaactgtgaagtactaactttccaaggcctgccttcccctccctcccactggagaagccgccagcccctttctccctctgcctgaccactgggtgtggacggtgtggggcagccctgaaaggacaggctcctggccttggcacttgcctgcacccaccatgaggcatggagcagggcagagcaagggccccgggacagagttttcccagacctggctcctcggcagagctgcctcccgtcagggcccacatcatctaggctccccagcccccactgtgaaggggctggccaggggcccgagctgcccccacccccggcctcagccaccagcacccccatagggcccccagacaccacacacatgcgcgtgcgcacacacacaaacacacacacactggacagtagatgggccgacacacacttggcccgagttcctccatttccctggcctgccccccacccccaacctgtcccacccccgtgccccctccttaccccgcaggacgggcctacaggggggtctcccctcacccctgcacccccagctgggggagctggctctgccccgacctccttcaccaggggttggggccccttcccctggagcccgtgggtgcacctgttactgttgggctttccactgagatctactggataaagaataaagttctatttattcta

SEQ ID NO: 100 - DNA, 2590 bp, Homo sapiens
  source 1..2590: mol_type = genomic DNA
agacaaacccaaaacatttatgtgcatagaaaaaaattctggaaggtcgtacacagtgaatttctctgagtgaaaagattgtggcaattgaaacacagagcaccagctctgaggaactcgtcccaagccccccatctccacttcctccccctcgagtgtacaaaccctgcttcgtctgccaggacaaatcatcagggtaccactatggggtcagcgcctgtgagggatgtaagggctttttccgcagaagtattcagaagaatatgatttacacttgtcaccgagataagaactgtgttattaataaagtcaccaggaatcgatgccaatactgtcgactccagaagtgctttgaagtgggaatgtccaaagaatctgtcaggaatgacaggaacaagaaaaagaaggagacttcgaagcaagaatgcacagagagctatgaaatgacagctgagttggacgatctcacagagaagatccgaaaagctcaccaggaaactttcccttcactctgccagctgggtaaatacaccacgaattccagtgctgaccatcgagtccgactggacctgggcctctgggacaaattcagtgaactggccaccaagtgcattattaagatcgtggagtttgctaaacgtctgcctggtttcactggcttgaccatcgcagaccaaattaccctgctgaaggccgcctgcctggacatcctgattcttagaatttgcaccaggtataccccagaacaagacaccatgactttctcagacggccttaccctaaatcgaactcagatgcacaatgctggatttggtcctctgactgaccttgtgttcacctttgccaaccagctcctgcctttggaaatggatgacacagaaacaggccttctcagtgccatctgcttaatctgtggagaccgccaggaccttgaggaaccgacaaaagtagataagctacaagaaccattgctggaagcactaaaaatttatatcagaaaaagacgacccagcaagcctcacatgtttccaaagatcttaatgaaaatcacagatctccgtagcatcagtgctaaaggtgcagagcgtgtaattaccttgaaaatggaaattcctggatcaatgccacctctcattcaagaaatgctggagaattctgaaggacatgaacccttgaccccaagttcaagtgggaacacagcagagcacagtcctagcatctcacccagctcagtggaaaacagtggggtcagtcagtcaccactcgtgcaataagacattttctagctacttcaaacattccccagtaccttcagttccaggatttaaaatgcaagaaaaaacatttttactgctgcttagtttttggactgaaaagatattaaaactcaagaaggaccaagaagttttcatatgtatcaatatatatactcctcactgtgtaacttacctagaaatacaaacttttccaattttaaaaaatcagccatttcatgcaaccagaaactagttaaaagcttctattttcctctttgaacactcaagattgcatggcaaagacccagtcaaaatgatttacccctggttaagtttctgaagactttgtacatacagaagtatggctctgttctttctatactgtatgtttggtgctttccttttgtcttgcatactcaaaataaccatgacaccaaggttatgaaatagactactgtacacgtctacctaggttcaaaaagataactgtcttgctttcatggaatagtcaagacatcaaggtaaggaaacaggactattgacaggactattgtacagtatgacaagataaggctgaagatattctactttagttagtatggaagcttgtctttgctctttctgatgctctcaaactgcatcttttatttcatgttgcccagtaaaagtatacaaattccctgcactagcagaagagaattctgtatcagtgtaactgccagttcagttaatcaaatgtcatttgttcaattgttaatgtcactttaaattaaaagtggtttattacttgtttaatgacataactacacagttagttaaaaaaaatttttttacagtaatgatagcctccaaggcagaaacacttttcagtgttaagtttttgtttacttgttcacaagccattagggaaatttcatgggataattagcaggctggtctaccacctggaccatgtaactctagtgtccttcctgattcatgcctgatattgggatttttttttccagccttcttgatgccaaggggctaattaatattaacaactcccaaagaaacaggcatagaatctgcctcctttgaccttgttcaatcactatgaagcagagtgaaagctgtggtagagtggttaacagatacaagtgtcagtttcttagttctcatttaagcactagtggaattttttttttttgatatattagcaagtctgtgatgtactttcactggctctgtttgtacattgagattgtttgtttaacaatgctttctatgttcatatactgtttacctttttccatggagtctcctggcaaagaataaaatatatttattttaaa

SEQ ID NO: 101 - DNA, 2640 bp, Homo sapiens
  source 1..2640: mol_type = genomic DNA
aggttggggggggggtggggagggagaaaaagaaagaaaatattttccgtgtccccgcctgcagagtcagtgtgcggtttgggagaaaatgtgtcggatattttggggcggtcacgtgggcgggcgggctccgagaggccccgggacagtcccagcctagagccgtgcccccccaggagccccccagtacggcgagccccggacattgcgacgctccatccaagagactgcccgacgccgggacctcggggctccgccgcctcccttccccctcccactccagcagctacggcccagttccctcaacctgacccagtatgtagaagccagtctctgcaggcggccagcggcggtggagacacagagcaccagctcagaggagatggtgcccagctcgccctcgccccctccgcctcctcgggtctacaagccatgcttcgtgtgcaatgacaagtcctctggctaccactatggggtcagctcttgtgaaggctgcaagggcttctttcgccgaagcatccagaagaacatggtgtacacgtgtcaccgcgacaaaaactgtatcatcaacaaggtgaccaggaatcgctgccagtactgccggctacagaagtgcttcgaagtgggcatgtccaaggaagctgtgcgaaatgaccggaacaagaagaagaaagaggtgaaggaagaagggtcacctgacagctatgagctgagccctcagttagaagagctcatcaccaaggtcagcaaagcccatcaggagactttcccctcgctctgccagctgggcaagtataccacgaactccagtgcagaccaccgcgtgcagctggatctggggctgtgggacaagttcagtgagctggctaccaagtgcatcatcaagatcgtggagtttgccaagcggttgcctggctttacagggctcagcattgctgaccagatcactctgctcaaagctgcctgcctagatatcctgatgctgcgtatctgcacaaggtacaccccagagcaggacaccatgaccttctccgacgggctgaccctgaaccggacccagatgcacaatgccggcttcgggcccctcacagaccttgtctttgcctttgctgggcagctcctgcccctggagatggatgacaccgagacagggctgctcagcgccatctgcctcatctgcggagaccgcatggacctggaggagcccgaaaaagtggacaagctgcaggagccactgctggaagccctgaggctgtacgcccggcgccggcggcccagccagccctacatgttcccaaggatgctaatgaaaatcaccgacctccggggcatcagcactaagggagctgaaagggccattactctgaagatggagattccaggcccgatgcctcccttaatccgagagatgctggagaaccctgaaatgtttgaggatgactcctcgcagcctggtccccaccccaatgcctctagcgaggatgaggttcctgggggccagggcaaagggggcctgaagtccccagcctgaccagggcccctgacctccccgctgtgggggttggggcttcaggcagcagactgaccatctcccagaccgccagtgactgggggaggacctgctctgccctctccccaccccttccaatgagctccttgtttttgccaaagtttctaggggtgcctctgtgttcatccccttcctgatctaaccggctccctcgccagtcccgggggcctgccctgctcccaccaggagagagggcaaagggatgagcctgggtttggactctaaaatctcagcactgccccatgggtcctagacttcccagggcaagaggaagaccctgccattccacagccccttcctctgccaggtgcttggctctctgagagcaaacaggaacactagagaccaaaaaggggacaaaggagaagggctgagcccaccttcttgctcctacccttggtgcctaatgctgtgtgatgcacctgcagggtgtgtgctagcctctgtgccccgtccttgtgccaggtcaaggtgggggcaggctgggccctgcatttctggggcaggaacagagggtgaaagggacagatagatgcaggtccattctgcacctcttggctcgggtgcagagttcaccctgtgccctccgttataagtccctcccccagccctgtcatgtgccttgggctcctcctgccctccatctcagccattggggcagggaccctcctacactacagaggggccaggggatccctctctccctagtgccttccaccctttactccccagagcagcttggcccagggaggggggatgctgcttagctgatcccgccctgacccagaggaagcctctatttatttattagcttttgtttacaccgtggaattgaccccttcctccaggggtcttgggtgggggagcccagggcccctgtgacccctcctttcttcctccaatccccagtttgtatttagctgccaaataagattcccattggctccctgtgttctcttggggggtcagggtgctgtcccctcccctctgtttacatctcccctctaccccgctgtatcgcatattgctgagttttctatttttgcaaaataaagtgatggaaactcatg

SEQ ID NO: 102 - DNA, 5614 bp, Homo sapiens
  source 1..5614: mol_type = genomic DNA
aggcggcagggctgcggcacgggccgggcggcaccatggcggcggcggcgcctgctgctgcggcggcttcttccgaggcgccagcggcgagtgcgactgcagagcccgaggccggggaccaggacagtcgcgaggttcgagtgttgcagagcctgcggggcaagatctgtgaagcaaaaaatttattgccatatcttggaccccacaaaatgagagattgtttctgtaccataaatttggaccaggaagaagtttatcgtacccaagttgtggaaaaatctttaagcccatttttcagtgaagaattttactttgagattccaagaactttccagtatttgtctttctatgtttatgataagaatgttttacaaagagatctccgtataggaaaagtagccatcaaaaaagaagacttgtgtaatcacagtggcaaagaaacttggttttcattacagcctgttgactccaattcagaggttcagggtaaagttcaccttgaattaaaactgaatgaactgataacggagaatggaactgtatgccagcagcttgttgtacacatcaaggcatgccatgggttgcctctcataaatggccaaagctgtgacccttatgcaacagtttctctagtgggcccttctaggaatgaccaaaagaagacaaaagtaaagaagaaaacaagcaatccgcagtttaatgaaatcttttattttgaggtaaccagatccagtagttacaccagaaagtcccagttccaggtagaagaggaggacattgaaaagctagaaatcaggatcgacttgtggaacaatggaaacctagtccaagatgttttcctaggtgagattaaggttcctgtgaacgtattaagaactgattcctctcatcaagcctggtacttgctacagccaagagacaatggaaacaagtcatccaaaactgatgacctggggtctcttcgattaaatatatgttatacagaagactacgtgcttccttcagagtactatggtcctttgaaaactttgctgctaaaatcaccagatgttcaaccaatatctgcctcagctgcttacattttgagtgaaatatgtcgagataaaaatgatgctgttttgccccttgtacgactgctgctgcaccatgataaacttgttccttttgccactgctgtggctgaattagacttgaaggatacacaagatgcaaacacaatttttagaggaaattccctggctacccgatgtctggatgagatgatgaaaatagtgggagggcactacctgaaagtaacattaaaacctattcttgatgagatatgtgactcctcaaaatcctgtgaaatcgatcctattaaattgaaagagggagataatgtagaaaataataaggagaatctgcgctactatgtagacaagttattcaatacaattgtaaaatcaagtatgagctgccccactgtaatgtgtgatatcttttattctctaaggcagatggctactcagagatttcctaatgaccctcatgttcagtattctgcagtgagcagctttgtatttcttcgtttctttgctgtagccgtagtatcacctcatacttttcatttgcgacctcatcatccagatgcacagacaattagaacattaactctcatctcaaaaactatacaaactttgggaagctgggggagtctgtccaaaagcaagtcaagtttcaaagagacattcatgtgtgaatttttcaaaatgtttcaagaagaaggatatattatagcagttaaaaagttcttggatgaaatttcatctactgaaactaaagagtccagtggtacgagtgagcctgtgcacctgaaagaaggtgagatgtataaaagagctcaaggaagaactcggattggaaaaaagaattttaagaaacgatggttctgcttaacaagcagagagctcacctaccacaaacagccaggcaaagatgcaatctacacaatcccagtaaaaaacattcttgctgtggaaaaactggaagagagctctttcaacaagaaaaatatgttccaagtaatacatacggagaaaccactctatgtccaggcaaataactgtgtagaagctaatgaatggatagacgtactctgcagggtgagccgatgcaatcaaaacaggctcagtttttatcatccctctgtgtatctgaacggaaattggctctgctgtcaggagactggtgaaaacactctcggctgcaagccatgtactgcaggtgtccctgcagacatccaaatagatattgatgaagacagagaaacagaaagaatttattccctttttaccctcagtttacttaagctgcagaagatggaagaggcttgtggaactattgcagtctatcaaggaccacagaaagagcctgatgattattctaactttgtaatcgaggattctgtaacaacctttaagacaattcagcaaataaaaagcataattgagaagctggatgaacctcatgaaaaatataggaagaaaagatccagtagtgcaaaatatgggagcaaggaaaatccaattgttgggaaagcatcttagagtttaacagattggttcagaagaactggaaaatattatttttcttggagcttttcaattcatcatgtattttgttcatggtatttaagaatgagcatccgcttcaatgtcatctgcctccacattgtatttaatatttaataattgaaattaattgtttgggaatcctggtattgatgtattactagagaatttaaagcccaagattcccttcatacctgtgtgaccaaatccatgtttctgcaacttctttttaatcgaaagaatcttcctagaaaagctttgtaacaaagggagaactcctccgtagcaagaaaccatctcttcttgtaacactctgttctgtggacttgttttcactaccatcagtgcctgctctatactgccaacattgtgttttactagaaaattccaattcatgacagttcagagcttttcatttagttcatgtagaccctcccactttaaaaaagaaaaaaaataagaagtgtttttcctttggtccatcagtcattacaggttccattcaagacagtgatagaaactttagaaaactgccagagcatacttgaaagttggtagatccttttgcctaaagatgtaaacaaaactcaagacagaaggaatcagggaatatgtgctattgtgtgcatcttgtttacatttgggatcagtgatggcaaaagaagtaatgagaccactgaaattgttttcattgttttaaataccaggtactcattttcttgatttgaaagtttaacatgacttctaaggacatctcttcaaaaagaaagtaaacagggaatgaaggtggtgggaaaatcacttcacttcacccactatttcatgttgtaataagggccaccataaggatgccctcctcatagtgttcggttctgatcttcctcgagaacagtcacttggcgcactttaataatctggactgctccagatttgactttagatactccatggtatctagtctttatgatcagttgaatgatcagtgtttaagtctaaaaataatgctttcctgaaaatgtttatatttcattgctgtttccttattgcctgctagccaaatggaatttgggcaagcaactctttgaagacttttttaccctagaaatttacttttgtcctaaaaaccctaactgtaaataagcagtcgaagcaagttgccaccttgaagttgagggatacactttgcttcatcagtattaaaaaccatggtactcttattttgtcttttttaattcaaaacattttctaaatgtggtactttgaaccttggagtatttacatgtttctgttcaaaactgtgacttattaatgtaagtctgctagtagtactttttttgtctgagcataagctatatttcaagatatactttgccaattttgttattggtgggtaatcatttttaaattatattgttattaggtaattatttttaaagactactggcatacaatcaaagttgttccataaaagaatataactgagcaatgtatttctctaaatgacttgtaaaaatcaatgaattatgtttaagtctgcattatggtaggttattactcccagctcattttaaagacaagtttgaaagagtcctttaaattttataagcttgtagattccataaactacactgatttatacatttgaaagaatttagccatttaataaatttcttattctcaaattgcatttagattaaaattccttttaagagtgtctgaaatgtctgcctgcgaagaacatgtaaacattgccagataccagtcattattctttagtggctttttagtcctctgcttttttttttaaggcaaaagaaatatgcatctagcatttctaataccaaatccccaattgtgattgttttaaagatcatggtatgatcacagggaccaaggctgtgtgcatatataactctggatttgaaaggaggagagttcagccatctagttcttttcttcacatgacacttttaaacagccagtttgactggaattaaccaacttggcacagcctaaaaaaggagtaatgtgaaattaaattatttttctttgaaagtcttttgaaataagagaccatgtaagtaggaccctaagacaaccaaggaatttgcttccagggccctcattcctctgctgttacttacaaatgttttaatttttactacctgatattctttctctaccttttccacatttgaaaatatacaaggcagctcacttcatcctaaaaacctaaaaactccaggaaggaaagaaaaggatgatatggggaaatttgccataaatgccggttctggttcttagtttagccatttccatcagttgaaattgtggtgtgatctgttgcttgtttcgttgttgttttgtttttgtgtagctttgttttttaatattcatttaataagatgatgggcaatagcaaacatttttactcccaggaatataatttatcaaattgaactattttatttgccaaagaaacttgtttttaatatcacgggtaatgggtaagtgtgaaaactaggcttttttttatgaaacaaaaaaaggtgacgaataatatggcttttgtttctgtttctgaagcctgatttcatttatgccaggttttgaaaaacagatctttttcttaagtgaaagcacctttaatttgctctaacggtacatcctgtaaagacagaattctgcatagccttttaggtgtttttacagtatgtgaaaaatacaagactcattctagagttaaattaccaatcttggttgatattatctgcttccatttttattaatttggaaattaatatgttgctagtaaatattggtttttacagtacccagtttgaaaatgtaagttatcaaaacttaatgtagtgaatttgtgtaaccatgttgtattgttgagaatgtatttttatttaaattttattttcttatcaagagtattataaaaattaacttttgtaactgtcgcttggaaataactcaaataaattacaagaagcctg

SEQ ID NO: 103 - DNA, 10988 bp, Homo sapiens
  source 1..10988: mol_type = genomic DNA
caaagattttgattccagtggaatctttgctttagatttgtgtgtgtgtttgtgttcgtgaattgtaactccagaagcaatgcctgtacaagctccacaatggacggatttcctctcctgcccaatttgcactcagactttcgacgaaacaattcgaaagcccatcagtttgggttgtggccatactgtctgcaagatgtgcctgaataaactccaccgcaaggcttgcccatttgaccagaccactatcaatacagacattgagctcctccctgtgaactcagcattgctgcagctcgtgggtgctcaggtccctgagcagcagcctattactttgtgtagtggggttgaagacacaaagcattatgaggaagccaagaaatgtgtagaagaattagcattgtacttaaaaccgctcagcagtgctagaggagtgggtctgaacagcactactcagagtgttctgagtcgcccaatgcagaggaagcttgtgactctagtccactgtcaactagtagaagaagaaggcaggattcgtgccatgagggcagctcgatctttaggtgaacgaacagttacagagctcattctccagcaccagaatcctcagcaactctcttccaatctttgggcagcagtaagggctaggggatgccagttccttggaccagcaatgcaggaggaagctttaaagttggttctgctggccttagaagatggttctgctttgtcaagaaaagtattggttctgtttgtggtgcaaagattggagccacggtttcctcaagcctctaaaactagcattgggcatgttgttcagctcctttatagagcctcctgtttcaaggtcaccaaacgtgatgaagactcttctttgatgcagctgaaagaagaatttagaacctatgaagctctgcggcgagaacatgactcccagatagtgcagattgctatggaagcaggcttacgaattgcaccggaccagtggtcctctttgctttatggagaccagtctcacaaatctcatatgcagtccattattgacaagttgcagactccagcctcttttgcacagagtgttcaggaactaacaattgctctccagcgaactggagacccagcaaacttgaaccgactaagaccccatttggagctgttagcaaacattgaccctagtccagatgctcctcctcctacttgggaacagctggaaaatgggctggttgctgtgcgtacagtggtacatgggctggttgattatatccagaaccacagcaaaaaaggagcagatcagcagcagcctccacagcatagcaaatacaaaacatacatgtgtcgagatatgaagcagagaggaggatgccctcgtggggccagctgtacatttgcacactcacaggaggaactggaaaaatttcgtaaaatgaataagcgcctggttccgagaagacccttgagtgcctctttgggtcaacttaatgaggtgggcctgccttcagcagctatccttccagatgaaggtgcagtggatctccctagcagaaaacctcctgctctgccaaatggaattgtatcaacagggaatacagtaacacagcttattccgcgagggacagaccccagctatgattctagtctgaaaccaggaaaaatagatcatctgagcagtagtgctcctggatcccctcctgacctgctagaatctgttcctaagagtatttctgccttacctgtgaatccacattctatacctccaagggggccagcagatctgcctccaatgcctgttaccaaaccacttcagatggtacctcgaggttctcagttatatccagcacaacagacggatgtttattatcaggatcctcgaggagcagctccgccatttgaaccagcaccttatcagcagggtatgtattatactccaccaccacaatgtgtgtcccgctttgtccgacctccaccatctgctcctgaacctgctcctccctacttggatcattatccaccctacctccaagaacgtgttgtaaactctcagtatggcacacagccacagcagtacccacctatatacccatctcactatgatggccgtcgagtgtaccctgctccgtcttacacaagagaagagatattccgagaaagccctatacccattgagattccacctgcagcagtaccatcgtatgtaccagaatccagagaaagataccaacagatcgagagttactatccagtggctcctcatccaactcagatcagaccttcgtacctcagagaacctccttatagccggcttcctcctcctccccagcctcatcctagtctagatgaactacatcgccgacgaaaggaaataatggcccagctagaggaaagaaaggttatctctccacctccttttgcaccttcaccaaccttgcctcctacctttcatccggaagaatttttggatgaagacttgaaggtagctgggaaatacaaaggaaatgattatagccaatactctccctggtcatgtgacaccatcggctcctacattggaaccaaagatgcaaaacccaaagatgttgtggcagcagggagtgtggaaatgatgaatgtggagagtaaaggaatgagggaccagcgattagatcttcagagaagagcagcagaaaccagtgatgatgacctcatcccatttggagaccgaccaacagtgtctcggtttggtgccatctcacgaacttccaaaactatatatcagggtgctggtccaatgcaggctatggcacctcagggagctcctacaaaatctattaacatttcagattatagtccatatggaacccacggtggctggggagcttctccatattcacctcatcaaaacataccttctcagggacacttcagtgagagggagagaatatctatgtcagaagtggccagtcatggaaaaccccttccatctgctgagagagaacagctacgactagaattgcagcaattgaaccatcagattagccagcagacccagctacgtggactagaggctgttagtaacaggctggtgttgcagagggaggcaaacaccctggcaggccagtcacagcccccaccaccgccacctccaaaatggcctgggatgatctcaagtgagcagttgagcttggaactgcaccaggtggaaagggaaatcgggaagagaacacgggaactgagtatggaaaaccagtgttctctggacatgaaaagcaaactgaatacaagtaaacaagcagaaaatggacaaccagaaccacaaaacaaggttccggctgaggaccttacattgacattcagtgatgtaccaaatggatcagccttgacacaagagaatatcagcctcctatcaaacaagaccagctctctgaacctgtcagaggaccctgagggaggaggggataataatgactcccagagatcaggagttactcccagttctgctccttaaaatatgaggagtcctacttttatcttctgctcctaatcagtttgtcgggcataggggtaggagaacgcataacttctaaactttttctcttaagagcggtcagagaaatccaggaaattcaccagaggcaatgtgcacaaacaccactactaaaaacaaaccctgcacatagttcacattaatgcatttttttaatttaaagaaaaagaaaattagcagtatctgcaagcaattcagattaaatttgtttttgttctgtgaatgaactttattttaataactttggacgccttggatccagggctttaaaaaaaaaagatattatatatacactctgtttgattaattgtatgatcttaatgaagtaggttttcttgtattttggtattacatacccagtgtataatttgtataattcctcacccccaatccttatcaattctcaccaccccataaacttaaaacagaccaaaaatgtcagctttcagagaattctgtggtgcttgagaaacagacagtactagactgagttattagaaaatgtgcagcaaaccaacttttcccagagctgttatttggaattctttatccctttctagatcactagcttcattggatacgtatatttttcttgacattgaagctttttgtttgtttgggagggttttatttcttgtttttattttcaacttttcaaatagaattaccaattttgaagtcctcattttcatattaaggatcatttgcattctcttaatataatcagaaagctgattcagtgtttaattagatttaaatgttgatcaagaattaactgtaacttactagcactgaaaatacatgtttggtgtttcgcctgcgttcagctcatggttggaaatttgaagcagtgcttttcaaattaaacttttgctgacatcataggatgctaaaaaacaaggacaatcaactatgttttaaaactgcaacatttgatttgaacttaaaatgaatagagccacattattttaatggatgttttgttttacttgtgaactgattgagtcttaaggatagtttatgaattgatcacttgttgctcagaatcattagtataagtaggtaggaaatagtttgaagtcatttttcatagacttaactgtccaatgttgcaaatgtttcttcatgaaaatattgaaaagagtaaggttttttttttttttaattctgctgcacatattctgatgccatgtgtctgtgcttaattaactaagaccctataaaacgtgtttagtggggactgtttgatatagttgccctctccattcctctatttgcctgatttttttcagtttccctttctgtattttactactaaattagaaagcactggttatgtaataagttactacattgctttggttgagtaaaaacaagagtttatatttttcttgtttcttattttcttaacccttaactcctgctgaggtcataacaacctcagtctaagctctgtgtccatcatactgttaacttaaacaaatgggtggtgggggtgggaagggtaatacagtcctgccattgcctaccagtaggagagtccaaacagaacactcttttgagtagcaattatttaatttgcccagtcaaggcaccgtgtttatatactatttcacattgaatttgattatgccctacagacctggctggtcaaggatttgatatacacatattggcttgggattcgagctttcttttttatttaaataaaaatttatatatatattatatatatacatatatacatagctatatctgtatatatattgggtatgttttaaggattttttcgcatgagcgcagctgttgcgataaattgaccgattgggaggtggtagaagcactgaatgaaggtgaggctttttttttttccagttttcttatacatttgtcttctttttttaaaaaaaaaaaaaaaaatatatatatatatatatatatatatatatatgtatgctttttcttttttttttggcttttgtttgctttttgacttttacttaaaacccttttacatttccactttaaatgcctattgtttattgggagaaggaaagaaacttttgtatgtctgacagagtcccaagatttttcatttctctgcataacagtaaaaggcaacattattggcctccaaccttctttttttttttttttttttttttttggagagggagtctgcttctgttgcccaggctggagtgcagtgggttgatctcggctcgctacaacctccacctcccgggttcaagcgattctcctgcctcagcctcctgagtagctgggactacaggcacgcgccaccacgtccagctaatttttgtactacaaccttcttataagcagatttggactgatcttctcctttgggtatgtcagatcatcctaaattttagaagcagttgattcactttggaattcagaatgattcttgtattagaagataatttgtgggtattaatttttgtttaagtttaaaataaaagtaaagattcattttggatatcagttgaaaccccttagtaactcagtttctgttattcttgttctcatttcctttaaatacacttgttcttggcttttgccattttgattctgtgaagtaggcaggagcagggattaatttatacagtattcctgttctgaacaaaaccagaaaagtcactgtataaacttgacttaaaatagtatctttctcttttcatgtattttcatttgggggaaaaaaaatctctttaattgtaacctgaattcaagctgtacccctccatggtcctacactctagagctaatctggttgggcagaaaggcagaaggatggtatattgtcccattgtgcctataatgtattttaaattggtcattccaccttacctaatggaaattcttgcagctttcctagtgctcatcagcggttttaggaattcactaacacccccaaaatttgttttttgttttttgctttttttccttttccttttctctgtgatatcatgagcctgtaaggacaaatggcatatttgggcataactgcttgactctgtaactacttttttaaaatcaaaattgaaaaggtattaattgcttctggctttttaatttttttttttagagacaaagatgaaaccagataggaaatacagtttttatgttttctacttactaaaatattagtttcttctaaatattactttatttgtatttcactaaattccaaagcaaaaatcagatatctgagatgaacaattttgaatgggttaaggtaggagtaataagcattgtgttcactcatacataggtgagggaattttatttatagcgagaaatataaaagtattttgacttactcttttttcaaggagtcgctaggaaagggtagaagaactgagaataagacatctagattccatttctggtttatatgtagctcttttgcctaatttatatataattttgtcataagataagtccagtaactgtcctgtcttagataacgtacagaggctgaagtgaccaaagatccattccttattacttttctaattaaaagaagagttagctagatttctagtagtagtattctagatattgataagacattattcctaatgccaactacaaatattcaactactcagaatgtatttaaaaaattgtttggtacagcattaatgttggtgattcctttctcccatcttatttcccttcccttctattctttcccatgtatttcttttgcctaaaagaatattggtatgattctcatttgctactttgagtatataactccatcagactttccagagttcttcagggatggagctcaaagtttacatttttccatatatgtctttttttttcttgacctttttccaccctgtaatttccccttgacttacccactgccctccccaatctgcaacagtgacagtttgctgcctcaaaacagagcattcaaatgaattcgcttagccaataacttctgtgaagttgccttttctaatggtgttattactcagtgatgcacaaatgtggtatttgccctactggtaggcaaacaaaggtctggttaagaatggtaacctgctgttttctttaaaggagagccaaagacttgtgctttactctgttttggttttgggggaagtagtagccattttgatcatgaaaccttttagtatttgtgagttgattgtactgtgtaagtagatttatctaaagttaactgttaaagttagctagccttataaaatgtaaaagtaatgaaaattcatcagtttctctaagccagtgaatgtcgtcttttgtaatattgtgtataagcatttgtgcccaccccagcttctgctatcactgtggtcaagtcatgggtctgagtaaaagaattcttgagtatgtgactggtgagaaataactaactatagtcagtacatgtacagattgttaaaattcaagacaaaatactttcactaaaaaaaaggattcgtctcagtaaagaagtattcagttgctgtcacttacatacaaatggtggtgggtagcagtctcaccatttttctactctctttttgctcgttttaaataattgagtaaaggttttatttgtaaaatctatctgtaaaaagcacctgtaacgatttatatgtcattgaaaggaatggcccagttactttttaggagagattaataacctacctggaaattaactgcagtgtttacttagattttttccccctaataagagtctaagtgtgttaaatttttaactgatgatatggttacagtgttgcaaggtgatctcttcccctgaaaaatctgcctatccttttaagaaaaattagacctactaaactaaagcaaattttactttcatcattagcacctaaacaagcaagcagtctactactgtcatcattttacctgagtgcccattttgctgatccacattcatacctttctaccttggacagctatgatttttatatttatttgttgcttcagctcaggtttatgaaattttcctgctgaaatgacttattgggagttgtaggttgattatagttactattaaacattttctcaatttagcttttctgagccacttcaagaagaaagctgtttttgtcaaaaggtactattaattgtagcaagtaaatcttaagatttgaatttttaagattttatttctgtgttcactaaagatctttccacaagtaatagattataattgataagtaatactagctatagtgttaataaagagtaagactatcaccaccaggaataagtaacaccttttaataataaatctattcctaataggtatgttttcaatactgcactgaacaaagtgggtaaagagccctttgaaatcttattgtaataaagggacttacctcaccactggaatccttgttttcagagcctctggattttcagccaaacactgaatttctcctaaactttatccctgaaacatccctagagaacgaactttattttcacaagaaaataaggcacaataagggggaagaacttaaacctcaacataatatcgtgtccaaaaatgtgtatttagaaaaataaaatcctgtggagtttgttatcctaatgtttattttatactagataaggtgacttgttttcttgtattgaggtcttactgtttcagatttgtttttgtttctgttctaactctaagcagacagagctcacaagtctttggcatccattttaggttgtacactcagagtcatcttataactggaaactgtcaggtggtcccccaccccagtgagtgtatgaaagagtcaagaaaaagattggaaacaaactattgggtgaataattggttgctctattattattattattattatttgcctttttttaatcaccatttatttgtgtaatctttctccattgattggctgtcattcttataatatctgaactaccccataaaataattctctgacttaaaggcatttagcttttgcttatcgtttttacatcctctattcaactaagacactgtcttgagagttattttttccagatggatcgttggcctaaattttcacacttctcccctgttcatcctttttcctcttccctgcttcctgggaataaaaggaacttttttaaaaaaattaattagtccacaggtctcattatctttctttatgattaatctatgactttttggtacaagaacaatggaaaaagtgaattaaggtaatgaacaaaacctttcacccacttaaacattttccagttttgagattcctcttcgtgtttgtggtgtcttccccttgttaccccttctgccctttttctctgactatggtaatttggtctttaggctcatatcagtctccccgagacattctgcagtcattatcacctttttgggtggattttattttgttttattttgttttttttaaaaaaataactttttaacattggtgcatatttgcttgggatagagcttgtgtaatttaccaatcgtattgattgtaagtgattgtgccctgcagaggtatatttaacaagacaaaaataatcttggttaataaaggagcccatgagatttgagtcaggttgtaagtgaaatcacttacacttttggatagaatttatactcctgctcttataaatcagtggtagacttaccattttttaaagttttcttgcatttttttgtttttttattgccacagctccctattctttcttgcctgcctccacccccctgttcaggaaaaaaaaaaattgagccttaaagtgacagctgattttttaattgctgaattttgtgaaattttactttttccaagtgtttccaactttaaaaagagaagtgaagacaaataggttggaatggtgaagacaaatggattggaatttcacaggctgtgaataattccttaggatctggcaaaccgtgaagtcttatttgaagaccttatctcctgagagttcttttggagtaggaaaaagaaccctatttgaaatagaccgtttttctcttgtttttaatctgtttaatatttctgatttttaagcagctttcaaaacaagtgtggtggaaaaaaagaaatagtagtaggaagatgtttagggcagcagaactctgggtctaaataagtacatgttcccacttgttgccgatttttgagagtactagggccatctttctcaattttgtattatttgtgtgcatgtttatatcaaagatgcccattttgttaaaatgctatttcctttattaccttggaaactgactcagcctcatgttgctcctaattagtgtttaaggctcccatgagttgcagataaaatgatttattttaacaagtagaaggaggtgattcaccttttggattgtaaatatatgaaaatgtctacaaggtctttatctgctttctgtcagcatttatattaaatgataaattaatgaggaa

SEQ ID NO: 104 - DNA, 5754 bp, Homo sapiens
  source 1..5754: mol_type = genomic DNA
gtgagggcggcgatgagagcgaaagttgcgctcggctcgtcgctgggggcttgaagcggctccgcgctctgcccgtttgggcctcccccgactcggactcgcgcccgtgggctcccgccgcgcccgcccggccccgcgccggccccgcgccccctcccccgtctcggcgccccctcctcaggagccgcgggtccccgccactttcgcacggccccggcccccgccgatgccggccatggtggagaagggccccgaggtctcagggaagcggagagggaggaacaacgcggccgcctccgcctccgccgccgccgcctccgccgccgcctcggccgcctgcgcctcgccagccgccactgccgcctcgggcgccgccgcctcctcagcctcggccgccgccgcctcagccgccgccgcccccaataatggccagaataaaagtttggcggcggcggcgcccaatggcaacagcagcagcaactcctgggaggaaggcagctcgggctcgtccagcgacgaggagcacggtggcggtggcatgagggtcggaccccagtaccaggcggtggtgcccgacttcgaccccgccaaactggcaagacgcagtcaagaacgggacaatcttggcatgttggtctggtcacccaatcaaaatctgtcagaagcaaagttggatgaatacattgccattgccaaagaaaagcatgggtacaacatggaacaggctcttgggatgctcttctggcataaacataatatcgaaaagtcattggctgatttgcccaactttacccctttcccagatgagtggactgtggaagataaagtcttatttgagcaagcctttagttttcatgggaaaacttttcatagaatccaacaaatgcttccagataaatctatagcaagtctggtgaaattttactattcttggaagaagacgaggactaaaactagtgtgatggatcgccatgcccggaaacaaaaacgggagcgggaggagagcgaggatgaactggaagaggcaaatggaaacaatcccattgacattgaggttgatcaaaacaaggaaagcaaaaaggaggttccccctactgagacagttcctcaggtcaaaaaagaaaaacatagcacacaagctaaaaatagagcaaaaaggaaacctccaaaaggaatgtttctttctcaagaagatgtggaggctgtttctgccaatgccactgctgctaccacggtgctgagacaactagacatggaattggtttcagtcaaacgacagatccagaatattaaacagacaaacagtgctctcaaagaaaaacttgatggtggaatagaaccatatcgacttccagaggtcattcagaaatgtaatgcacgttggactacagaagagcagcttctcgccgtacaagccatcaggaaatatggccgagattttcaggcaatctcagacgtgattgggaacaaatcagtggtacaagtgaaaaacttttttgtaaattatcgacgccgcttcaacatagatgaagttttacaagaatgggaggcagaacatggtaaagaagagaccaatgggcccagtaaccagaagcctgtgaagtccccagataattccattaagatgcccgaagaggaagacgaggctcctgttctggatgtcagatatgcatctgcctcctgagaaactggtggctttgaacacttggtgtggactactgtgttatccgggatatcaggtattatgagacatcacctagccatctgcatcacatctctctggacaagcagctattaccaaaaaaggcatatacttccagtcctgtgctccatctgccttaattctttgctcgttcctccatgttggcgccacttcccagagagctccactgcatctcacactctgcccacgtgctggggaagtctcacggcctgcacatctcttgtgactctgggaaccgcctctcccgccggagcccccgagccccaccaatggcagctcttcccagtcagcagcttcagagcaggcagtctccttggaaggcccgactctgttcctgcatggcctgcagtttctactttgtgcatagagtcattttcagagtcaccgcgaccctgttggccttctagaaagtttcttttgttcttttctgagacaaccacctaagtgataatacgcttttttggaaactaatatatattgccagactgcatcataacctttatcatgccaagcatcctgatgcaactcacatttccctaaacatggggtacagttatgatttataaattgagttggcttaaatctccctcttctcccttcccaagtgttacaaagatcatttactgcaactgtcgttggacactgtagcttaaagggaacgtggacctcaatgctttctgccttcaacttttcagcattgtgaccccagggtggttgccaccccatcttttcctgaccccccccacccccccacctccaagaggttcggcccacatcactgtacctggtgcttgtaaatttggaattggtgccttctccttttggcaaccatggttatcaatcctttttctgttttagtgtcttatttcttctttcaagttatttgctagccaaagatgacatcactgagattaggagacaggggagagcttgctgcagattctgacagtgcagattttaaatgtcaggatattagaatagctggcgctggtttatgaaagctgcgcgttgttccgcgttctctcggtgtgcctggccttttatgtggcactctgtatgtcagtttgtgtccttcatgtgctgatgtgattacacaaacaccatgcactctcttttcatatcagagtacaggacagagaagtgatcaatgtattggtctagtgagactgagatgaaaagaaataacctacagagtggtctgtaatgccttttggttggactgggaacaagtaaaaatttctaataaacattttgagacttccagaatcacttttgttatcttatcagaccatgggcctgctgagggttgagcagacagcctgcattctaacataccctgttcccaccccacggccattcagactgcactcaatacgctgaagtcgcttttgttgttgttgttgttgtttgcatcatttggatttttttcctgctttcaataccaaaaaaatgcagatgctttaaggcctaaacagaattctgaagaatttaaaatatgcaattaaagtttgatatgttttgtctcccaagcaccttgttttttgttgttgttgttgttgttgaagtcagctgattttctctttagaaagagggtcagctagaaacctaggttttttggaattgtaaatttttttttagtatagtctggagagaaaggtcattcaaaaggaaagtacaatgggacttgctgcccttcatcatctcgttcccgtgccaggtgtgtgttggtcacgtaaaagcctgggaagcatcagaggagtcccggattgctgctgctacctggagacagggttagcaaaataacactagtgatgagggagaggcttcttttcaccataagcctgctgtgtacaccgagggcggcaggagaagcatgggaaggagtcagcctaagtttgcacattgcataaagggtacactaaggtatgagctgaagctttaggttctccgtgcttccctcaagacctccttcttgctaacagaagcagtaggcaattgctgcagtgcgtttctcaccctgccaataggtctgtctgtatctctgttaaggaaaatagcctggtccctcctggcagtgcttggaagcttgatgctaatttttatatagcgtggcaaactgaccagcagtgccaggccttgatctgtattctgcactatccctttacttggttcctggcactgaatggtctccagccctgaagaatcacgtgtgatcacagcagctgacctgggctttctccccgagaggaaggggcatgtcatttttatttgacagagggaaaatgggagctgtccttgactgcctttgttgtgctttcccgcgtaagatagcactgtgttttaaactgttgcattacactgtctttgcaatgatgtaaatgtaagaaatcacttagctttaaaagcgcagtggtttgatcttatttatatgaagactttttaacatatcaagaattaggtgcattggcaggtagggtttggggtgtgataactgcttcagatggaatgttcacttaagctttgtcttcttaaaaattatcaatgtgaatgtcataattatatatatttttgtggaaaattttctcctaagtataagttattgtgcaaaatatagtgtcattgatgcaaataatagtttaacttttagtttagaactcctaaaagatataaattgtattgcatatgcattaaaagtttgttttatttaattttatgtagatgtgtgaagtgttaggtaaaatttttttcacttatccatttaaacaccttgttacttgaatattgtgttgactggtctgcaacagtgatccattctgtaatatagctcttttaactgggaaggaaccacaccccagttgtgccgattacattagtgttggcacacagtcgggtgctagtgtaacacaaatgccgcgttgtctgggtgtacagtgtttgtggagacgccacttcctcaaaatggtttttgattgtttttaacctataagacgttctgatgctcacaaacctctattcaacacacaaaacaaacatgaaaaggtagttagttgggttgtaacagcttactggggtggactcataaaacagtggctttctgttcatctaaagtttcctcagataccacagaccactgttaagtgtgctcattgtcactttaaatttcaacgataccctatttttgtcattctaaatatcagatgtactattggtataattgcacaccaaaaataagccaaacagtgcattacgctaactggatccctgcttttatgtgagctaaggaaagatggagccaactccaacgagggcctctttttctctcttgtctagcctgtttctaaaccgaatgatccaggattcaagcttctattgtcaagtgaaactttcctcagatggactccaggtagccaggtcacctaaacctagtggtcctgtgcgatgctctttctgccagtccctgaatctctgcagcttctcttacctgtcttacctgtagtaaagcacaattgcagtggcgtcgcattcagaagaagggaaggtcagcagaggctatgcatgttgtgtgatgatgagtgtttacagccaccttctcctaaaacgaaatttataccggggtggatagtattccattaggtagacttatcgactttgctaagtgctttttagacagcttaaaaaattttcaagattttaaaagatgtataaggttaagtttgcaaatataatggaaatgctgtatatcttttgaagtgatgaaatccacgttggaattttaaagaaaatatgttgtaataatgctgttgtaagtaatattttaatgtctctttgcctgttttctatttcagcacattcattgtggtgaatgttcatagcattataactgcttagccattgaatgataacatttgttagtggaaattggaaaatttatttgtgaaattctgcagaattcatttttctatttccaatatttgctgaggttaaataaaaattttcaagccattgatgtaataaaatatgaaatgaaagca

SEQ ID NO: 105 - DNA, 3624 bp, Homo sapiens
  source 1..3624: mol_type = genomic DNA
gggccgcgcgcaggcgcagagtgcggaagtcgggccgcggccgccgcagagcgccgccgccgacgccggcgccggctgctaaggggctcggcccgcgagcgcctgctgccgcggacgatggtgaccgtacgggccgggccgctgccgctgccgctgcctccgcctccccagaagcaacatccgaggctcggcgcagaagagccgccgctgtgagccgtgccgtaccggcccccgccgccgcccgaggagaacgggagggcgggcgagagagccggggagttgcggagcccgcccgccggcagcgccgctccccagggagggagtccgcagcctgaggtcttctccaagaaaaaaaaaaagaaaaaaaaaaacaacatggctgcaaaggagaaactggaggcagtgttaaatgtggccctgagggtgccaagcatcatgctgttggatgtcctgtacagatgggatgtcagctcctttttccagcagatccaaagaagtagccttagtaataaccctcttttccagtataagtatttggctcttaatatgcattatgtaggttatatcttaagtgtggtgctgctaacattgcccaggcagcatctggttcagctttatctatattttttgactgctctgctcctctatgctggacatcaaatttccagggactatgttcggagtgaactggagtttgcctatgagggaccaatgtatttagaacctctctctatgaatcggtttaccacagccttaataggtcagttggtggtgtgtactttatgctcctgtgtcatgaaaacaaagcagatttggctgttttcagctcacatgcttcctctgctagcacgactctgccttgttcctttggagacaattgttatcatcaataaatttgctatgatttttactggattggaagttctctattttcttgggtctaatcttttggtaccttataaccttgctaaatctgcatacagagaattggttcaggtagtggaggtatatggccttctcgccttgggaatgtccctgtggaatcaactggtagtccctgttcttttcatggttttctggctcgtcttatttgctcttcagatttactcctatttcagtactcgagatcagcctgcatcacgtgagaggcttcttttcctttttctgacaagtattgcggaatgctgcagcactccttactctcttttgggtttggtcttcacggtttcttttgttgccttgggtgttctcacactctgcaagttttacttgcagggttatcgagctttcatgaatgatcctgccatgaatcggggcatgacagaaggagtaacgctgttaatcctggcagtgcagactgggctgatagaactgcaggttgttcatcgggcattcttgctcagtattatccttttcattgtcgtagcttctatcctacagtctatgttagaaattgcagatcctattgttttggcactgggagcatctagagacaagagcttgtggaaacacttccgtgctgtaagcctttgtttatttttattggtattccctgcttatatggcttatatgatttgccagtttttccacatggatttttggcttcttatcattatttccagcagcattcttacctctcttcaggttctgggaacactttttatttatgtcttatttatggttgaggaattcagaaaagagccagtggaaaacatggatgatgtcatctactatgtgaatggcacttaccgcctgctggagtttcttgtggccctctgtgtggtggcctatggcgtctcagagaccatctttggagaatggacagtgatgggctcaatgatcatcttcattcattcctactataacgtgtggcttcgggcccagctggggtggaagagctttcttctccgcagggatgctgtgaataagattaaatcgttacccattgctacgaaagagcagcttgagaaacacaatgatatttgtgccatctgttatcaggacatgaaatctgctgtgatcacgccttgcagtcattttttccatgcaggctgtcttaagaaatggctgtatgtccaggagacctgccctctgtgccactgccatctgaaaaactcctcccagcttccaggattaggaactgagccagttctacagcctcatgctggagctgagcaaaacgtcatgtttcaggaaggtactgaacccccaggccaggagcatactccagggaccaggatacaggaaggttccagggacaataatgagtacattgccagacgaccagataaccaggaaggggcttttgaccccaaagaatatcctcacagtgcgaaagatgaagcacatcctgttgaatcagcctagaggagaagcagcaggaatgatgctttgatactctggaggagaagttaactcaagatggaattcatgttctgatttgaggaatgaaaatgagatgatcaggcaggaaactgacattccaaggatctaatccaggaagtactctcagtggggaccacctgctttcatcccctgacattgtgggagaaattttgcaatgtatgctaatcaaaatgtatttatatgttctctgctgatgttttatagaggtttgtgaagaaaattcaacctcagcaacttcagaaactgcccctgatacgtgtgagagagaaataaaatcagattttgagtgttgaagggactgaggaagtgaggataaagagcatgaggacagcatggaaagaaggaggcagaagtggaactgaactttcactctccatgggacagatcaatctcattatcaagtctgaatagcaaccagccctctcctccaccccgtttctcctcagttaattggagctcagtcaggtgattattgagtcttgtacagcactgaaatgaaatcaaagatgaagaagcattgattgtattcaaagattgaagcacgctcatactttgtatgtgctttagggaaggggtgggtgggcacttgggccttgcgggtgcattcatgtaatctgagactcttgaactttatgacggagtcttcagtattttgatgtatatgaaacttttgttaaatatgttgtatacttcgctggctgtgtgaagtaaactaaaactctgatgaacactttggagtctgctttagtgaaggagaccaaagtgggaagggctttagggcactgatagaggccctgggtgtacttttcaatcctgtgtaatgtttaattcttgcaactgaatcaaaacagtgttaaattatggcaatatttgcactttgggaatgagtacataactgtatgatcacactctgcaaatgccacttttaaagctgttaatagactttgcaccttttctttgacaaggatgtgtcatatttaaatttttacattcatcatggctacaggtagaactggggaggggggaatgtaattttttatgggaattttgatatgaaaagaaactagtcatttatttatacaataggcttggctcaaaaagtgtttttcagacctcggtattcctaatgtgggatgtgactttattttatttttagtagcaaatttggatgtagactgacagacatagctgaatgtcttaataaatttaaatttgaag

SEQ ID NO: 106 - DNA, 3874 bp, Homo sapiens
  source 1..3874: mol_type = genomic DNA
aggctcgagcggtcaaagctctttccgggggcccggggaactactctccttgcctcgctctgtctccttcgaagtgctctgcgcgaggttcagagcggccgccgcctccaaagggacggttttctagagctccgacgcctctcggtgcccctctgctccggcccttgccctttgacctcgctctcgcggcagggtgagaggtcgggtggccatcttgtggcggcggcgcgggcggctgttactgcggagacccatcccctcccccttctcgcacccctggcagtctgtcagtcggtaaaaagtcccgcagcctgtcaggtgaggccccggcctcgtgccgtcgctcttcccgccgcactgggcggcccaggccgctccctgccgggcctcactgccgccaccatgtcctccttctctgagtcggcgctggagaagaagctctcggagctgagcaactctcagcagagcgtgcagaccctgtccctttggctcatccaccaccgcaagcacgcgggacccatcgtctccgtgtggcaccgcgagctccgcaaagccaaatcaaatagaaagcttacttttctgtatttagcgaatgatgtcatccaaaacagtaaaaggaaaggacctgaattcactagagaatttgaatctgtccttgtggatgctttttctcatgttgccagagaggcagatgaaggctgtaaaaaacctttagaaagattgctgaacatctggcaagaacgaagtgtgtatggcggcgagttcatacagcagctgaagctgtctatggaggactccaagagccctccccccaaagcaacagaagagaagaaatctctgaaacgaacttttcagcaaattcaggaggaggaggatgacgactaccctggcagctactctcctcaggatccttctgcaggacccctcttgactgaggaactaatcaaagctttgcaggatctggaaaatgccgcatcaggggatgctactgtccgacagaaaattgcttctctgccccaggaagtgcaagatgtttctctattggaaaaaataacagacaaagaggcagctgaacgtctttcaaaaacagtagatgaagcatgtctgttactagcagaatataacgggcgcctggcagcagaactggaggaccgtcgccagctggctcggatgttggtggagtatacccagaatcagaaagatgttttgtcggagaaggagaaaaaactagaggaatacaaacagaagcttgcacgagtaacccaggtccgcaaggaactgaaatcccatattcagagcttgccagacctctcactgctgcccaacgtcacagggggcttagcccccctgccctctgctggggacctgttttcaactgactaggatgggtgtcatgtcccagatttctgtttgtaccagcagaaagaagagggcaagtcatggttggaaataaccttctagcccctggttctatcccttcttccgcccagccccccagcctcaagaaagaacctcagactctgattctcctcttcagcctctcatcttgagcacagttcagaacagtggcgactggaatctggtttatattcatatttgcaaagactacagactttttctcccacttcatattttcatgcccccctgttggttttccattcttaactgtctccttatacctaagaagttatgaaaatcatgtgtacttctggaagctttcgaaagaatcttgtccctcatgacagcattttatcatgaaagcagcttctcctttctgggctgggcttgttcaagttcggtgtgggcttccactaaggcacttgtcctggagacgttggctttcccagctgcatctgccccaaaaggttgtaggcacagctgtcgtagcgttgccataaagagtttgccaaatctctgatcctccctttccattgcttctcctagtgatgcacgaagattaggtgcatttattttgtaaacagattggagaatctagcaataagattcaaagctaatctggagcataaaggcacagttcagagacagaataacagggatcacaagcatgaattaaaaggaatttatttgcttcaagttcctagatacaaccttcccatgctgcacttctccactgtcggagcacgttccgaaaaacagaatgccttgatccctggtgggtgcgaaggcagttgttagggatggcaggcattggtgggctccaaaagatgaaggccccacacacaggtgtgctgcatttgggatctgtgtgggtgtttcttggaccctttcttctgggagtagggtacacactaacgtttaatccgctgtctgggtgcatgtccacagtacggtggctaaactcgaacatcactgcaaataggacgctgagcaggtccgtctgtcatgtcacgccactgcacaggtccttgtccccacacgacggggagtacttgcgtcagatgttattgaatagctcgtctcgggcaggggaagcggggagttggggatattaattgggggttttaattctattatcatgtcagctgacattatgactatataatgtagttagagacaatttttatcttgcttatagtaaaggttcagcctgccaattgtaaatcattctaatttggcaggcttatttttgacattggaaagggcagaaagcgatttgccccagtagtgtaataggagttatagaccagaggctgaaacccaaactatataaaaaggaattcagtggagggggctttgtaatctccattaatttgtgttgctacttccaggatcaccaaaaattacatgtaattttacatgttaaacacattgaaacataacctatgtttataaagcataacgggcttcccttccagaagctctcctgcttgtcatgaagtgagaacaatgaaaagtcatagcagatactcagtttaactctgtgtagaacctagtagtgtttgagctgttattcagatttgaattcagactgtgtgttgtttgcttatggacactgcctgtcgttctgtcactgttaaattaatgagtctataaggtttttcttccagaggccataggtgacatcactaaaattgcaagataaattgtaatctttgctgctgctgcactccccaacctctcccccaccccccgtggtgtgctgctttctagatgagcgtgttttggagcaggcccatctgggacactctatgctttcaccaaggaagtgcgatctgagcagccacaatccagccaaaagaggatcgtagatatttgctctgatcaactagatgaaaatatagcagaatggatttagcccactgctctgttttatccaactgagtctctgaccagcaattggtgcataattattacagcaaaagttaagaaatgaaactgtagcaattatgtaaatgaatgtgttggcctcttaatacctgttactagtggacttcctgtgaggaagttagttttttgttttgatgaaatgctttcgttttttaaatcttaattctgctgtccacatcctcccaaagtgtgcttacttcatttgtttaatttaaatgaactttcctccttgtatgtatgaggtgacttggtgggtggggtgggtggtttttgtttttgtgttttttctttcttagggcatctgtaggcctcaaaggacctttcctttaggtcatattcctcagaaagtcttcaatcttcccttgtttttgtttgtttgtttttcttaaagaatattttcaaagcttaaatttgtatattaatttaggactatttagaagtataggctgtcgttggcggcagcagtatattctgaaatgtctcatagatatatatttttgaataaagatggtgttgttgaacaaca

SEQ ID NO: 107 - DNA, 7274 bp, Homo sapiens
  source 1..7274: mol_type = genomic DNA
catagagccagcgggcgcgggcgggacgggcgccccgcggccggacccagccagggcaccacgctgcccggccctgcgccgccaggcacttctttccggggctcctagggacgccagaaggaagtcaacctctgctgcttctccttggcctgcgttggaccttcctttttttgttgtttttttttgtttttcccctttcttccttttgaattaactggcttcttggctggatgttttcaacttctttcctggctgcgaacttttccccaattgttttccttttacaacagggggagaaagtgctctgtggtccgaggcgagccgtgaagttgcgtgtgcgtggcagtgtgcgtggcaggatgtgcgtgcgtgtgtaacccgagccgcccgatctgtttcgatctgcgccgcggagccctccctcaaggcccgctccacctgctgcggttacgcggcgctcgtgggtgttcgtgcctcggagcagctaaccggcgggtgctgggcgacggtggaggagtatcgtctcgctgctgcccgagtcagggctgagtcacccagctgatgtagacagtggctgccttccgaagagtgcgtgtttgcatgtgtgtgactctgcggctgctcaactcccaacaaaccagaggaccagccacaaacttaaccaacatccccaaacccgagttcacagatgtgggagagctgtagaaccctgagtgtcatcgactgggccttcttatgattgttgttttaagattagctgaagatctctgaaacgctgaattttctgcactgagcgttttgacagaattcattgagagaacagagaacatgacaagtacttctagctcagcactgctccaactactgaagctgattttcaaggctacttaaaaaaatctgcagcgtacattaatggatttctgttgtgtttaaattctccacagattgtattgtaaatattttatgaagtagagcatatgtatatatttatatatacgtgcacatacattagtagcactacctttggaagtctcagctcttgcttttcgggactgaagccagttttgcatgataaaagtggccttgttacgggagataattgtgttctgttgggactttagacaaaactcacctgcaaaaaactgacaggcattaactactggaacttccaaataatgtgtttgctgatcgttttactcttcgcataaatattttaggaagtgtatgagaattttgccttcaggaacttttctaacagccaaagacagaacttaacctctgcaagcaagattcgtggaagatagtctccactttttaatgcactaagcaatcggttgctaggagcccatcctgggtcagaggccgatccgcagaaccagaacgttttcccctcctggactgttagtaacttagtctccctcctcccctaaccacccccgcccccccccaccccccgcagtaataaaggcccctgaacgtgtatgttggtctcccgggagctgcttgctgaagatccgcgcccctgtcgccgtctggtaggagctgtttgcagggtcctaactcaatcggcttgttgtgatgcgtatccccgtagatgccagcacgagccgccgcttcacgccgccttccaccgcgctgagcccaggcaagatgagcgaggcgttgccgctgggcgccccggacgccggcgctgccctggccggcaagctgaggagcggcgaccgcagcatggtggaggtgctggccgaccacccgggcgagctggtgcgcaccgacagccccaacttcctctgctccgtgctgcctacgcactggcgctgcaacaagaccctgcccatcgctttcaaggtggtggccctaggggatgttccagatggcactctggtcactgtgatggctggcaatgatgaaaactactcggctgagctgagaaatgctaccgcagccatgaagaaccaggttgcaagatttaatgacctcaggtttgtcggtcgaagtggaagagggaaaagcttcactctgaccatcactgtcttcacaaacccaccgcaagtcgccacctaccacagagccatcaaaatcacagtggatgggccccgagaacctcgaagacatcggcagaaactagatgatcagaccaagcccgggagcttgtccttttccgagcggctcagtgaactggagcagctgcggcgcacagccatgagggtcagcccacaccacccagcccccacgcccaaccctcgtgcctccctgaaccactccactgcctttaaccctcagcctcagagtcagatgcaggatacaaggcagatccaaccatccccaccgtggtcctacgatcagtcctaccaatacctgggatccattgcctctccttctgtgcacccagcaacgcccatttcacctggacgtgccagcggcatgacaaccctctctgcagaactttccagtcgactctcaacggcacccgacctgacagcgttcagcgacccgcgccagttccccgcgctgccctccatctccgacccccgcatgcactatccaggcgccttcacctactccccgacgccggtcacctcgggcatcggcatcggcatgtcggccatgggctcggccacgcgctaccacacctacctgccgccgccctaccccggctcgtcgcaagcgcagggaggcccgttccaagccagctcgccctcctaccacctgtactacggcgcctcggccggctcctaccagttctccatggtgggcggcgagcgctcgccgccgcgcatcctgccgccctgcaccaacgcctccaccggctccgcgctgctcaaccccagcctcccgaaccagagcgacgtggtggaggccgagggcagccacagcaactcccccaccaacatggcgccctccgcgcgcctggaggaggccgtgtggaggccctactgaggcgccaggcctggcccggctgggccccgcgggccgccgccttcgcctccgggcgcgcgggcctcctgttcgcgacaagcccgccgggatcccgggccctgggcccggccaccgtcctggggccgagggcgcccgacggccaggatctcgctgtaggtcaggcccgcgcagcctcctgcgcccagaagcccacgccgccgccgtctgctggcgccccggccctcgcggaggtgtccgaggcgacgcacctcgagggtgtccgccggccccagcacccaggggacgcgctggaaagcaaacaggaagattcccggagggaaactgtgaatgcttctgatttagcaatgctgtgaataaaaagaaagattttatacccttgacttaactttttaaccaagttgtttattccaaagagtgtggaattttggttggggtggggggagaggagggatgcaactcgccctgtttggcatctaattcttatttttaatttttccgcaccttatcaattgcaaaatgcgtatttgcatttgggtggtttttatttttatatacgtttatataaatatatataaattgagcttgcttctttcttgctttgaccatggaaagaaatatgattcccttttctttaagttttatttaacttttcttttggacttttgggtagttgtttttttttgttttgttttgtttttttgagaaacagctacagctttgggtcatttttaactactgtattcccacaaggaatccccagatatttatgtatcttgatgttcagacatttatgtgttgataattttttaattatttaaatgtacttatattaagaaaaatatcaagtactacattttcttttgttcttgatagtagccaaagttaaatgtatcacattgaagaaggctagaaaaaaagaatgagtaatgtgatcgcttggttatccagaagtattgtttacattaaactccctttcatgttaatcaaacaagtgagtagctcacgcagcaacgtttttaataggatttttagacactgagggtcactccaaggatcagaagtatggaattttctgccaggctcaacaagggtctcatatctaacttcctccttaaaacagagaaggtcaatctagttccagagggttgaggcaggtgccaataattacatctttggagaggatttgatttctgcccagggatttgctcaccccaaggtcatctgataatttcacagatgctgtgtaacagaacacagccaaagtaaactgtgtaggggagccacatttacataggaaccaaatcaatgaatttaggggttacgattatagcaatttaagggcccaccagaagcaggcctcgaggagtcaatttgcctctgtgtgcctcagtggagacaagtgggaaaacatggtcccacctgtgcgagaccccctgtcctgtgctgctcactcaacaacatctttgtgttgctttcaccaggctgagaccctaccctatggggtatatgggcttttacctgtgcaccagtgtgacaggaaagattcatgtcactactgtccgtggctacaattcaaaggtatccaatgtcgctgtaaattttatggcactatttttattggaggatttggtcagaatgcagttgttgtacaactcataaatactaactgctgattttgacacatgtgtgctccaaatgatctggtggttatttaacgtacctcttaaaattcgttgaaacgatttcaggtcaactctgaagagtatttgaaagcaggacttcagaacagtgtttgatttttattttataaatttaagcattcaaattaggcaaatctttggctgcaggcagcaaaaacagctggacttatttaaaacaacttgtttttgagttttcttatatatatattgattatttgttttacacacatgcagtagcactttggtaagagttaaagagtaaagcagcttatgttgtcaggtcgttcttatctagagaagagctatagcagatctcggacaaactcagaatatattcactttcatttttgacaggattccctccacaactcagtttcatatattattccgtattacatttttgcagctaaattaccataaaatgtcagcaaatgtaaaaatttaatttctgaaaagcaccattagcccatttcccccaaattaaacgtaaatgttttttttcagcacatgttaccatgtctgacctgcaaaaatgctggagaaaaatgaaggaaaaaattatgtttttcagtttaattctgttaactgaagatattccaactcaaaaccagcctcatgctctgattagataatcttttacattgaacctttactctcaaagccatgtgtggagggggcttgtcactattgtaggctcactggattggtcatttagagtttcacagactcttaccagcatatatagtatttaattgtttcaaaaaaaatcaaactgtagttgttttggcgataggtctcacgcaacacatttttgtatgtgtgtgtgtgtgcgtgtgtgtgtgtgtgtgtgaaaaattgcattcattgacttcaggtagattaaggtatctttttattcattgccctcaggaaagttaaggtatcaatgagacccttaagccaatcatgtaataactgcatgtgtctggtccaggagaagtattgaataagccatttctactgcttactcatgtccctatttatgatttcaacatggatacatatttcagttctttctttttctcactatctgaaaatacatttccctccctctcttccccccaatatctccctttttttctctcttcctctatcttccaaaccccactttctccctcctccttttcctgtgttctcttaagcagatagcacatacccccacccagtaccaaatttcagaacacaagaaggtccagttcttcccccttcacataaaggaacatggtttgtcagcctttctcctgtttatgggtttcttccagcagaacagagacattgccaaccatattggatctgcttgctgtccaaaccagcaaactttcctgggcaaatcacaatcagtgagtaaatagacagcctttctgctgccttgggtttctgtgcagataaacagaaatgctctgattagaaaggaaatgaatggttccactcaaatgtcctgcaatttaggattgcagatttctgccttgaaatacctgtttctttgggacattccgtcctgatgatttttatttttgttggtttttatttttggggggaatgacatgtttgggtcttttatacatgaaaatttgtttgacaataatctcacaaaacatattttacatctgaacaaaatgcctttttgtttaccgtagcgtatacatttgttttgggatttttgtgtgtttgttgggaattttgtttttagccaggtcagtattgatgaggctgatcatttggctctttttttccttccagaagagttgcatcaacaaagttaattgtatttatgtatgtaaatagattttaagcttcattataaaatattgttaatgcctataactttttttcaatttttttgtgtgtgtttctaaggactttttcttaggtttgctaaatactgtagggaaaaaaatgcttctttctactttgtttattttagactttaaaatgagctacttcttattcacttttgtaaacagctaatagcatggttccaattttttttaagttcactttttttgttctaggggaaatgaatgtgcaaaaaaagaaaaagaactgttggttatttgtgttattctggatgtataaaaatcaatggaaaaaaataaactttcaaattgaaatgacggtataacacatctactgaaaaagcaacgggaaatgtggtcctatttaagccagcccccacctagggtctatttgtgtggcagttattgggtttggtcacaaaacatcctgaaaattcgtgcgtgggcttctttctccctggtacaaacgtatggaatgcttcttaaaggggaactgtcaagctggtgtcttcagccagatgacatgagagaatatcccagaaccctctctccaaggtgtttctagatagcacaggagagcaggcactgcactgtccacagtccacggtacacagtcgggtgggccgcctcccctctcctgggagcattcgtcgtgcccagcctgagcagggcagctggactgctgctgttcaggagccaccagagccttcctctctttgtaccacagtttcttctgtaaatccagtgttacaatcagtgtgaatggcaaataaacagtttgacaagtacatacaccata

SEQ ID NO: 108 - DNA, 3861 bp, Homo sapiens
  source 1..3861: mol_type = genomic DNA
gccgctgttatgcgtattcccgtagacccaagcaccagccgccgcttcacacctccctccccggccttcccctgcggcggcggcggcggcaagatgggcgagaacagcggcgcgctgagcgcgcaggcggccgtggggcccggagggcgcgcccggcccgaggtgcgctcgatggtggacgtgctggcggaccacgcaggcgagctcgtgcgcaccgacagccccaacttcctctgctccgtgctgccctcgcactggcgctgcaacaagacgctgcccgtcgccttcaaggtggtggcattgggggacgtgccggatggtacggtggtgactgtgatggcaggcaatgacgagaactactccgctgagctgcgcaatgcctcggccgtcatgaagaaccaggtggccaggttcaacgaccttcgcttcgtgggccgcagtgggcgagggaagagtttcaccctgaccatcactgtgttcaccaaccccacccaagtggcgacctaccaccgagccatcaaggtgaccgtggacggaccccgggagcccagacggcaccggcagaagctggaggaccagaccaagccgttccctgaccgctttggggacctggaacggctgcgcatgcgggtgacaccgagcacacccagcccccgaggctcactcagcaccacaagccacttcagcagccagccccagaccccaatccaaggcacctcggaactgaacccattctccgacccccgccagtttgaccgctccttccccacgctgccaaccctcacggagagccgcttcccagaccccaggatgcattatcccggggccatgtcagctgccttcccctacagcgccacgccctcgggcacgagcatcagcagcctcagcgtggcgggcatgccggccaccagccgcttccaccatacctacctcccgccaccctacccgggggccccgcagaaccagagcgggcccttccaggccaacccgtccccctaccacctctactacgggacatcctctggctcctaccagttctccatggtggccggcagcagcagtgggggcgaccgctcacctacccgcatgctggcctcttgcaccagcagcgctgcctctgtcgccgccggcaacctcatgaaccccagcctgggcggccagagtgatggcgtggaggccgacggcagccacagcaactcacccacggccctgagcacgccaggccgcatggatgaggccgtgtggcggccctactgaccgccctggtggactcctcccgctggaggcggggaccctaacaaccttcaagaccagtgatgggccggctccgaggctccgggcgggaatgggacctgcgctccagggtggtctcggtcccagggtggtcccagctggtgggagcctctggctgcatctgtgcagccacatccttgtacagaggcataggttaccacccccaccccggcccgggatactgcccccggcccagatcctggccgtctcatcccatacttctgtggggaatcagcctcctgccacccccccggaaggacctcactgtctccagctatgcccagtgctgcatgggacccatgtctcctgggacagaggccatctctcttccagagagaggcagcattggcccacaggataagcctcaggccctgggaaacctcccgacccctgcaccttcgttggagcccctgcatcccctgggtccagccccctctgcatttacacagatttgagtcagaactggaaagtgtcccccacccccaccaccctcgagcggggttcccctcattgtacagatggggcaggacccagcacgctgctggcagagatggtttgagaacacatccaagccagtccccccagcccagcttcccctccgttcctaactgttggctttcccccagccgcacgggtcccaggccccagagaagatgagtctatggcatcaggttcttaaacccaggaaagcacctacagaccggctcctccatgcactttaccagctcaacgcatccactctctgttctcttggcagggcgggggaggggggataggaggtcccctttcccctaggtggtctcataattccatttgtggagagaacaggagggccagatagataggtcctagcagaaggcattgaggtgagggatcattttgggtcagacatcaatgtccctgtcccccctgggtccagccaagctgtgccccatcccccaagcctcctgggaggatccagccaaatcttgcgactcctggcacacacctgtctgtaacctgttttgtgctctgaaagcaaatagtcctgagcaaaaaaaaaaaaaaaacaaaaaaacaaaaaaaaaacaaaacagtttttaaaactgattttagaaaaagaagcttaatctaacgttttcaaacacaaggtctcttacaggtatagttccgtgattatgatagctctgtgattataagcaacatccccgccccctctcccccccgcggacccccagctgcctcctgagggtgtggggttattagggtctcaatactttctcaaggggctacactccccatcaggcagcatcccaccagcctgcaccacaggctcccctgggaggacgagggaaacgctgatgagacgctgggcatctctcctctgtggctctaggacatctgtccaggaggctgggcggaggtgggcaggatgtgagaggtggggagtactggctgtgcgtggcaggacagaagcactgtaaagggctctccagccgcagctcagctgcactgcgttccgaggtgaagtcttgcccctgaattttgcaaaatgggaaagtgggcgcttgcccaagggccaggctgcatggattctcacatcagagttctctggccctagaaaggcttagaaaaggcgtaagggaactcataaaggctagcagcatgcggtattttaactttctgcctcggcctctgtggatgcagaaatctgccctacaaaatgctcttcattggttgtctctgtgagagcactgtccccacccaacctgtcacaacggccagaaccatacaccagagacacactggcaggttaggcagtccttctggtgatcctattccattccctcctgctgcggtttctcttggcctgtcctcactggaaaaacagtctccatctcctcaaaatagttgctgactccctgcacccaaggggcctctccatgccttcttaggaagcagctatgaatccattgtccttgtagtttcttccctcctgttctctggttatagctggtcccaggtcagcgtgggaggcacctttgggttcccagtgcccagcactttgtagtctcatcccagattactaacccttcctgatcctggagaggcagggatagtaaataaattgctcttcctaccccatcccccatcccctgacaaaaagtgacggcagccgtactgagtctgtaaggcccaaagtgggtacagacagcctgggctggtaaaagtaggtccttatttacaaggctgcgttaaagttgtactaggcaaacacactgatgtaggaagcacgaggaaaggaagacgttttgatatagtgttactgtgagcctgtcagtagtgggtaccaatcttttgtgacatattgtcatgctgaggtgtgacacctgctgcactcatctgatgtaaaaccatcccagagctggcgagaggatggagctgggtggaaactgctttgcactatcgtttgcttggtgtttgtttttaacgcacaacttgcttgtacagtaaactgtcttctgtactatttaactgtaaaatggaattttgactgatttgttacaataatataactctgagatgtgt

SEQ ID NO: 109 - DNA, 4437 bp, Homo sapiens
  source 1..4437: mol_type = genomic DNA
ggcactaaaggtttgcttccgggcgtttcttttgcttccccttccctctttcacgcttcctcccctccccctcctcccttatcccttcgctttcgctcttttccgtcgaggccgacccctgagttgtgagtctggggtctggttggtgaaaaagagcccttgaagctggaagacgggagaggacaaaagcatgtcttcccttcctgggtgcattggtttggatgcagcaacagctacagtggagtctgaagagattgcagagctgcaacaggcagtggttgaggaactgggtatctctatggaggaacttcggcatttcatcgatgaggaactggagaagatggattgtgtacagcaacgcaagaagcagctagcagagttagagacatgggtaatacagaaagaatctgaggtggctcacgttgaccaactctttgatgatgcatccagggcagtgactaattgtgagtctttggtgaaggacttctactccaagctgggactacaataccgggacagtagctctgaggacgaatcttcccggcctacagaaataattgagattcctgatgaagatgatgatgtcctcagtattgattcaggtgatgctgggagcagaactccaaaagaccagaagctccgtgaagctatggctgccttaagaaagtcagctcaagatgttcagaagttcatggatgctgtcaacaagaagagcagttcccaggatctgcataaaggaaccttgagtcagatgtctggagaactaagcaaagatggtgacctgatagtcagcatgcgaattctgggcaagaagagaactaagacttggcacaaaggcacccttattgccatccagacagttgggccagggaagaaatacaaggtgaaatttgacaacaaaggaaagagtctactgtcggggaaccatattgcctatgattaccaccctcctgctgacaagctgtatgtgggcagtcgggtggtcgccaaatacaaagatgggaatcaggtctggctctatgctggcattgtagctgagacaccaaacgtcaaaaacaagctcaggtttctcattttctttgatgatggctatgcttcctatgtcacacagtcggaactgtatcccatttgccggccactgaaaaagacttgggaggacatagaagacatctcctgccgtgacttcatagaggagtatgtcactgcctaccccaaccgccccatggtactgctcaagagtggccagcttatcaagactgagtgggaaggcacgtggtggaagtcccgagttgaggaggtggatggcagcctagtcaggatcctcttcctggatgacaaaagatgtgagtggatctatcgaggctctacacggctggagcccatgttcagcatgaaaacatcctcagcctctgcactggagaagaagcaaggacagctcaggacacgtccaaatatgggtgctgtgaggagcaaaggccctgttgtccagtacacacaggatctgaccggtactggaacccagttcaagccagtggaacccccacagcctacagctccacctgccccacctttcccacctgctccacctctatccccccaagcaggtgacagtgacttggaaagccagcttgcccagtcacggaagcaggtagccaaaaagagcacgtcctttcgaccaggatctgtgggctctggtcattcctcccctacatctcctgcactcagtgaaaatgtctctggtgggaaacctgggatcaaccagacatatagatcacctttaggctccacagcctctgccccagcaccctcagcactcccggcccctccagcacccccagtcttccatggcatgctggagcgggccccagcagagccctcctaccgtgctcccatggagaagcttttctacttacctcatgtctgcagctatacctgtctgtctcgagtcagacctatgaggaatgagcagtaccggggcaagaaccctctgctggtcccgttactatatgacttccggcggatgacagcccggcgtcgagttaaccgcaagatgggctttcatgttatctataagacaccttgtggtctctgccttcggacaatgcaggagatagaacgctaccttttcgagactggctgtgacttcctcttcctggagatgttctgtttggatccatatgttcttgtggaccgaaagtttcagccctataagcctttttactatattttggacatcacttatgggaaggaagatgttcccctatcctgtgtcaatgagattgacacaacccctccaccccaggtggcctacagcaaggaacgtatcccgggcaagggtgttttcattaacacaggccctgaatttctggttggctgtgactgcaaggatgggtgtcgggacaagtccaagtgtgcctgccatcaactaactatccaggctacagcctgtaccccaggaggccaaatcaaccctaactctggctaccagtacaagagactagaagagtgtctacccacaggggtatatgagtgtaacaaacgctgcaaatgtgacccaaacatgtgcacaaaccggttggtgcaacatggactacaagttcggctacagctattcaagacacagaacaagggctggggtatccgctgcttggatgacattgccaaaggctcttttgtttgtatttatgcaggcaaaatcctgacagatgactttgcagacaaggagggtctggaaatgggtgatgagtactttgcaaatctggaccatatcgagagcgtggagaacttcaaagaaggatatgagagtgatgccccctgttcctctgacagcagtggtgtagacttgaaggaccaggaagatggcaacagcggtacagaggaccctgaagagtccaatgatgatagctcagatgataacttctgtaaggatgaggacttcagcaccagttcagtgtggcggagctatgctacccggaggcagacccggggccagaaagagaacggactctctgagacaacttccaaggactcccaccccccagatcttggacccccacatattcctgttcctccctcaatccctgtaggtggctgcaatccaccttcctccgaagagacacccaagaacaaggtggcctcatggttgagctgcaatagtgtcagtgaaggtggttttgctgactctgatagccattcatccttcaagactaatgaaggtggggagggccgggctgggggaagccgaatggaggctgagaaggcctccacctcaggactaggcatcaaggatgagggagacatcaaacaggccaagaaagaggacactgacgaccgaaacaagatgtcagtagttactgaaagctctcgaaattacggttacaatccttctcctgtgaagcctgaaggacttcgccgcccacctagtaagactagtatgcatcaaagccgaagactcatggcttctgctcagtccaaccctgatgatgtcctgacactgtccagcagcacagaaagtgagggggaaagtgggaccagccgaaagcccactgctggtcagacttcggctacagcggttgacagtgatgatatccagaccatatcctctggctctgaaggggatgactttgaggacaagaagaacatgactggtccaatgaagcgtcaagtggcagtaaaatcaacccgaggctttgctcttaaatcaacccatgggattgcaattaaatcaaccaacatggcctctgtggacaagggggagagcgcacctgttcgtaagaacacacgccaattctatgatggcgaggagtcttgctacatcattgatgccaagcttgaaggcaacctgggccgctacctcaaccacagttgcagccccaacctgtttgtccagaatgtcttcgtggatacccatgatcttcgcttcccctgggtggccttctttgccagcaaaagaatccgggctgggacagaacttacttgggactacaactacgaggtgggcagtgtggaaggcaaggagctactctgttgctgtggggccattgaatgcagaggacgtcttctttagaggacagccttcttcccaacccttcttgaactgtcgtttcctcaggaactgggtcttcctgattgttgaaccctgacccgaagtctctgggctagctactccccccagctcctagttgatagaaatgggggttctggaccagatgatcccttccaatgtggtgctagcaggcaggatcccttctccacctccaaaggccctaaagggtggggagagatcaccactctaacctcggcctgacatccctcccatcccatatttgtccaagtgttcctgcttctaacagactttgttcttagaatggagcctgtgtatctactatctccagtttgtattatttcttgaaagtcttttaacaatatgataaaact

SEQ ID NO: 110 - DNA, 3873 bp, Homo sapiens
  source 1..3873: mol_type = genomic DNA
agacatgagtggacaccttagggggctcggctgcggaaaaggtgctgcagtccacagggaacatggggggattggacgggttgcctgaagaagagaggaaagaatccctcaccccagcccccaaaaggctgtgatgggatggggaaaccccataatcgctgtcttccggacaccttttgccccttggctgcagttccactggtcggcgcccttctcagcctggcttggaaccgtcctcactcacctccactcctcccagcagcgctcaggcacaacggtgtgtcctccctgtgacaacgagttgaaatctgaggccatcattgaacatctctgtgccagcgagtttgcactgaggatgaaaataaaagaagtgaaaaaagaaaatggcgacaagaagattgtccccaagaagaagaagcccctgaagttggggcccatcaagaagaaggacctgaagaagcttgtgctgtacctgaagaatggggctgactgtccctgccaccagctggacaacctcagccaccacttcctcatcatgggccgcaaggtgaagagccagtacttgctgacggccatccacaagtgggacaagaaaaacaaggagttcaaaaacttcatgaagaaaatgaaaaaccatgagtgccccacctttcagtccgtgtttaagtgattctcccgggggcagggtggggagggagcctcgggtggggtgggagcgggggggacagtgccccgggaacccggtgggtcacacacacgcactgcgcctgtcagtagtggacattgtaatccagtcggcttgttcttgcagcattcccgctcccttccctccatagccacgctccaaaccccagggtagccatggccgggtaaagcaagggccatttagattaggaaggtttttaagatccgcaatgtggagcagcagccactgcacaggaggaggtgacaaaccatttccaacagcaacacagccactaaaacacaaaaagggggattgggcggaaagtgagagccagcagcaaaaactacattttgcaacttgttggtgtggatctattggctgatctatgcctttcaactagaaaattctaatgattggcaagtcacgttgttttcaggtccagagtagtttctttctgtctgctttaaatggaaacagactcataccacacttacaattaaggtcaagcccagaaagtgataagtgcagggaggaaaagtgcaagtccattatgtaatagtgacagcaaagggaccaggggagaggcattgccttctctgcccacagtctttccgtgtgattgtctttgaatctgaatcagccagtctcagatgccccaaagtttcggttcctatgagcccggggcatgatctgatccccaagacatgtggaggggcagcctgtgcctgcctttgtgtcagaaaaaggaaaccacagtgagcctgagagagacggcgattttcgggctgagaaggcagtagttttcaaaacacatagttaaaaaagaaacaaatgaaaaaaattttagaacagtccagcaaattgctagtcagggtgaattgtgaaattgggtgaagagcttaggattctaatctcatgttttttccttttcacatttttaaaagaacaatgacaaacacccacttatttttcaaggttttaaaacagtctacattgagcatttgaaaggtgtgctagaacaaggtctcctgatccgtccgaggctgcttcccagaggagcagctctccccaggcatttgccaagggaggcggatttccctggtagtgtagctgtgtggctttccttcctgaagagtccgtggttgccctagaacctaacaccccctagcaaaactcacagagctttccgtttttttctttcctgtaaagaaacatttcctttgaacttgattgcctatggatcaaagaaattcagaacagcctgcctgtccccccgcactttttacatatatttgtttcatttctgcagatggaaagttgacatgggtggggtgtccccatccagcgagagagtttcaaaagcaaaacatctctgcagtttttcccaagtaccctgagatacttcccaaagcccttatgtttaatcagcgatgtatataagccagttcacttagacaactttacccttcttgtccaatgtacaggaagtagttctaaaaaaaatgcatattaatttcttcccccaaagccggattcttaattctctgcaacactttgaggacatttatgattgtccctctgggccaatgcttatacccagtgaggatgctgcagtgaggctgtaaagtggccccctgcggccctagcctgacccggaggaaaggatggtagattctgttaactcttgaagactccagtatgaaaatcagcatgcccgcctagttacctaccggagagttatcctgataaattaacctctcacagttagtgatcctgtccttttaacaccttttttgtggggttctctctgacctttcatcgtaaagtgctggggaccttaagtgatttgcctgtaattttggatgattaaaaaatgtgtatatatattagctaattagaaatattctacttctctgttgtcaaactgaaattcagagcaagttcctgagtgcgtggatctgggtcttagttctggttgattcactcaagagttcagtgctcatacgtatctgctcattttgacaaagtgcctcatgcaaccgggccctctctctgcggcagagtccttagtggaggggtttacctggaacattagtagttaccacagaatacggaagagcaggtgactgtgctgtgcagctctctaaatgggaattctcaggtaggaagcaacagcttcagaaagagctcaaaataaattggaaatgtgaatcgcagctgtgggttttaccaccgtctgtctcagagtcccaggaccttgagtgtcattagttactttattgaaggttttagacccatagcagctttgtctctgtcacatcagcaatttcagaaccaaaagggaggctctctgtaggcacagagctgcactatcacgagcctttgtttttctccacaaagtatctaacaaaaccaatgtgcagactgattggcctggtcattggtctccgagagaggaggtttgcctgtgatttcctaattatcgctagggccaaggtgggatttgtaaagctttacaataatcattctggatagagtcctgggaggtccttggcagaactcagttaaatctttgaagaatatttgtagttatcttagaagatagcatgggaggtgaggattccaaaaacattttatttttaaaatatcctgtgtaacacttggctcttggtacctgtgggttagcatcaagttctccccagggtagaattcaatcagagctccagtttgcatttggatgtgtaaattacagtaatcccatttcccaaacctaaaatctgtttttctcatcagactctgagtaactggttgctgtgtcataacttcatagatgcaggaggctcaggtgatctgtttgaggagagcaccctaggcagcctgcagggaataacatactggccgttctgacctgttgccagcagatacacaggacatggatgaaattcccgtttcctctagtttcttcctgtagtactcctcttttagatcctaagtctcttacaaaagctttgaatactgtgaaaatgttttacattccatttcatttgtgttgtttttttaactgcattttaccagatgttttgatgttatcgcttatgttaatagtaattcccgtacgtgttcattttattttcatgctttttcagccatgtatcaatattcacttgactaaaatcactcaattaatc

SEQ ID NO: 111 - DNA, 1971 bp, Homo sapiens
  source 1..1971: mol_type = genomic DNA
aggttcgatacaagaggctgttttcctagcgtggcttgctgcctttggtaagaacatgtcgtccatcttgccattcacgccgccagttgtgaagagactgctgggatggaagaagtcagctggtgggtctggaggagcaggcggaggagagcagaatgggcaggaagaaaagtggtgtgagaaagcagtgaaaagtctggtgaagaagctaaagaaaacaggacgattagatgagcttgagaaagccatcaccactcaaaactgtaatactaaatgtgttaccataccaaggtctcttgatggtcgtctccaggtatcccatcgaaaaggattgccacatgttatatattgccgattatggcgctggcctgatcttcacagtcatcatgaactcaaggcaattgaaaactgcgaatatgcttttaatcttaaaaaggatgaagtatgtgtaaacccttaccactatcagagagttgagacaccagttttgcctccagtattagtgccccgacacaccgagatcctaacagaacttccgcctctggatgactatactcactccattccagaaaacactaacttcccagcaggaattgagccacagagtaattatattccagaaacgccacctcctggatatatcagtgaagatggagaaacaagtgaccaacagttgaatcaaagtatggacacaggctctccagcagaactatctcctactactctttcccctgttaatcatagcttggatttacagccagttacttactcagaacctgcattttggtgttcgatagcatattatgaattaaatcagagggttggagaaaccttccatgcatcacagccctcactcactgtagatggctttacagacccatcaaattcagagaggttctgcttaggtttactctccaatgttaaccgaaatgccacggtagaaatgacaagaaggcatataggaagaggagtgcgcttatactacataggtggggaagtttttgctgagtgcctaagtgatagtgcaatctttgtgcagagccccaattgtaatcagagatatggctggcaccctgcaacagtgtgtaaaattccaccaggctgtaatctgaagatcttcaacaaccaggaatttgctgctcttctggctcagtctgttaatcagggttttgaagccgtctatcagctaactagaatgtgcaccataagaatgagttttgtgaaagggtggggagcagaataccgaaggcagacggtaacaagtactccttgctggattgaacttcatctgaatggacctctacagtggttggacaaagtattaactcagatgggatccccttcagtgcgttgctcaagcatgtcataaagcttcaccaatcaagtcccatgaaaagacttaatgtaacaactcttctgtcatagcattgtgtgtggtccctatggactgtttactatccaaaagttcaagagagaaaacagcacttgaggtctcatcaattaaagcaccttgtggaatctgtttcctatatttgaatattagatgggaaaattagtgtctagaaatactctcccattaaagaggaagagaagattttaaagacttaatgatgtcttattgggcataaaactgagtgtcccaaaggtttattaataacagtagtagttatgtgtacaggtaatgtatcatgatccagtatcacagtattgtgctgtttatatacatttttagtttgcatagatgaggtgtgtgtgtgcgctgcttcttgatctaggcaaacctttataaagttgcagtacctaatctgttattcccacttctctgttatttttgtgtgtcttttttaatatataatatatatcaagattttcaaattatttagaagcagattttcctgtagaaaaactaatttttctgccttttaccaaaaataaactcttgggggaagaaaagtggattaacttttgaaa

SEQ ID NO: 112 - DNA, 5554 bp, Homo sapiens
  source 1..5554: mol_type = genomic DNA
cggcgagcgcgcgcgcagcgggggcgcgggtggcgcgcgtgtgtgtgaagggggggcggtggccgaggcgggcgggcgcgcgcgcgaggcttcccctcgtttggcggcggcggcggcttctttgtttcgtgaagagaagcgagacgcccattctgcccccggccccgcgcggaggggcgggggaggcgccgggaagtcgacggcgccggcggctcctgcaggaggccactgtctgcagctcccgtgaagatgtccactccagacccacccctgggcggaactcctcggccaggtccttccccgggccctggcccttcccctggagccatgctgggccctagcccgggtccctcgccgggctccgcccacagcatgatggggcccagcccagggccgccctcagcaggacaccccatccccacccaggggcctggagggtaccctcaggacaacatgcaccagatgcacaagcccatggagtccatgcatgagaagggcatgtcggacgacccgcgctacaaccagatgaaaggaatggggatgcggtcagggggccatgctgggatggggcccccgcccagccccatggaccagcactcccaaggttacccctcgcccctgggtggctctgagcatgcctctagtccagttccagccagtggcccgtcttcggggccccagatgtcttccgggccaggaggtgccccgctggatggtgctgacccccaggccttggggcagcagaaccggggcccaaccccatttaaccagaaccagctgcaccagctcagagctcagatcatggcctacaagatgctggccagggggcagcccctccccgaccacctgcagatggcggtgcagggcaagcggccgatgcccgggatgcagcagcagatgccaacgctacctccaccctcggtgtccgcaacaggacccggccctggccctggccctggccccggcccgggtcccggcccggcacctccaaattacagcaggcctcatggtatgggagggcccaacatgcctcccccaggaccctcgggcgtgccccccgggatgccaggccagcctcctggagggcctcccaagccctggcctgaaggacccatggcgaatgctgctgcccccacgagcacccctcagaagctgattcccccgcagccaacgggccgcccttcccccgcgccccctgccgtcccacccgccgcctcgcccgtgatgccaccgcagacccagtcccccgggcagccggcccagcccgcgcccatggtgccactgcaccagaagcagagccgcatcacccccatccagaagccgcggggcctcgaccctgtggagatcctgcaggagcgcgagtacaggctgcaggctcgcatcgcacaccgaattcaggaacttgaaaaccttcccgggtccctggccggggatttgcgaaccaaagcgaccattgagctcaaggccctcaggctgctgaacttccagaggcagctgcgccaggaggtggtggtgtgcatgcggagggacacagcgctggagacagccctcaatgctaaggcctacaagcgcagcaagcgccagtccctgcgcgaggcccgcatcactgagaagctggagaagcagcagaagatcgagcaggagcgcaagcgccggcagaagcaccaggaatacctcaatagcattctccagcatgccaaggatttcaaggaatatcacagatccgtcacaggcaaaatccagaagctgaccaaggcagtggccacgtaccatgccaacacggagcgggagcagaagaaagagaacgagcggatcgagaaggagcgcatgcggaggctcatggctgaagatgaggaggggtaccgcaagctcatcgaccagaagaaggacaagcgcctggcctacctcttgcagcagacagacgagtacgtggctaacctcacggagctggtgcggcagcacaaggctgcccaggtcgccaaggagaaaaagaagaaaaagaaaaagaagaaggcagaaaatgcagaaggacagacgcctgccattgggccggatggcgagcctctggacgagaccagccagatgagcgacctcccggtgaaggtgatccacgtggagagtgggaagatcctcacaggcacagatgcccccaaagccgggcagctggaggcctggctcgagatgaacccggggtatgaagtagctccgaggtctgatagtgaagaaagtggctcagaagaagaggaagaggaggaggaggaagagcagccgcaggcagcacagcctcccaccctgcccgtggaggagaagaagaagattccagatccagacagcgatgacgtctctgaggtggacgcgcggcacatcattgagaatgccaagcaagatgtcgatgatgaatatggcgtgtcccaggcccttgcacgtggcctgcagtcctactatgccgtggcccatgctgtcactgagagagtggacaagcagtcagcgcttatggtcaatggtgtcctcaaacagtaccagatcaaaggtttggagtggctggtgtccctgtacaacaacaacctgaacggcatcctggccgacgagatgggcctggggaagaccatccagaccatcgcgctcatcacgtacctcatggagcacaaacgcatcaatgggcccttcctcatcatcgtgcctctctcaacgctgtccaactgggcgtacgagtttgacaagtgggccccctccgtggtgaaggtgtcttacaagggatccccagcagcaagacgggcctttgtcccccagctccggagtgggaagttcaacgtcttgctgacgacgtacgagtacatcatcaaagacaagcacatcctcgccaagatccgttggaagtacatgattgtggacgaaggtcaccgcatgaagaaccaccactgcaagctgacgcaggtgctcaacacgcactatgtggcaccccgccgcctgctgctgacgggcacaccgctgcagaacaagcttcccgagctctgggcgctgctcaacttcctgctgcccaccatcttcaagagctgcagcaccttcgagcagtggtttaacgcaccctttgccatgaccggggaaaaggtggacctgaatgaggaggaaaccattctcatcatccggcgtctccacaaagtgctgcggcccttcttgctccgacgactcaagaaggaagtcgaggcccagttgcccgaaaaggtggagtacgtcatcaagtgcgacatgtctgcgctgcagcgagtgctctaccgccacatgcaggccaagggcgtgctgctgactgatggctccgagaaggacaagaagggcaaaggcggcaccaagaccctgatgaacaccatcatgcagctgcggaagatctgcaaccacccctacatgttccagcacatcgaggagtccttttccgagcacttggggttcactggcggcattgtccaagggctggacctgtaccgagcctcgggtaaatttgagcttcttgatagaattcttcccaaactccgagcaaccaaccacaaagtgctgctgttctgccaaatgacctccctcatgaccatcatggaagattactttgcgtatcgcggctttaaatacctcaggcttgatggaaccacgaaggcggaggaccggggcatgctgctgaaaaccttcaacgagcccggctctgagtacttcatcttcctgctcagcacccgggctggggggctcggcctgaacctccagtcggcagacactgtgatcatttttgacagcgactggaatcctcaccaggacctgcaagcgcaggaccgagcccaccgcatcgggcagcagaacgaggtgcgtgtgctccgcctctgcaccgtcaacagcgtggaggagaagatcctagctgcagccaagtacaagctcaacgtggaccagaaggtgatccaggccggcatgttcgaccagaagtcctccagccatgagcggcgcgccttcctgcaggccatcctggagcacgaggagcaggatgaggaggaagacgaggtgcccgacgacgagaccgtcaaccagatgatcgcccggcacgaggaggagtttgatctgttcatgcgcatggacctggaccgcaggcgcgaggaggcccgcaaccccaagcggaagccgcgcctcatggaggaggacgagctcccctcgtggatcatcaaggacgacgcggaggtggagcggctgacctgtgaggaggaggaggagaagatgttcggccgtggctcccgccaccgcaaggaggtggactacagcgactcactgacggagaagcagtggctcaaggccatcgaggagggcacgctggaggagatcgaagaggaggtccggcagaagaaatcatcacggaagcgcaagcgagacagcgacgccggctcctccaccccgaccaccagcacccgcagccgcgacaaggacgacgagagcaagaagcagaagaagcgcgggcggccgcctgccgagaaactctcccctaacccacccaacctcaccaagaagatgaagaagattgtggatgccgtgatcaagtacaaggacagcagcagtggacgtcagctcagcgaggtcttcatccagctgccctcgcgaaaggagctgcccgagtactacgagctcatccgcaagcccgtggacttcaagaagataaaggagcgcattcgcaaccacaagtaccgcagcctcaacgacctagagaaggacgtcatgctcctgtgccagaacgcacagaccttcaacctggagggctccctgatctatgaagactccatcgtcttgcagtcggtcttcaccagcgtgcggcagaaaatcgagaaggaggatgacagtgaaggcgaggagagtgaggaggaggaagagggcgaggaggaaggctccgaatccgaatctcggtccgtcaaagtgaagatcaagcttggccggaaggagaaggcacaggaccggctgaagggcggccggcggcggccgagccgagggtcccgagccaagccggtcgtgagtgacgatgacagtgaggaggaacaagaggaggaccgctcaggaagtggcagcgaagaagactgagccccgacattccagtctcgaccccgagcccctcgttccagagctgagatggcataggccttagcagtaacgggtagcagcagatgtagtttcagacttggagtaaaactgtataaacaaaagaatcttccatatttatacagcagagaagctgtaggactgtttgtgactggccctgtcctggcatcagtagcatctgtaacagcattaactgtcttaaagagagagagagagaattccgaattggggaacacacgatacctgtttttcttttccgttgctggcagtactgttgcgccgcagtttggagtcactgtagttaagtgtggatgcatgtgcgtcaccgtccactcctcctactgtattttattggacaggtcagactcgccgggggcccggcgagggtatgtcagtgtcactggatgtcaaacagtaataaattaaaccaacaacaaaacgc

SEQ ID NO: 113 - DNA, 5210 bp, Homo sapiens
  source 1..5210: mol_type = genomic DNA
gcgcgcgcgtcagcgtcaacgccagcgcctgcgcactgagggcggcctggtcgtcgtctgcggcggcggcggcggctgaggagcccggctgaggcgccagtacccggcccggtccgcatttcgccttccggcttcggtttccctcggcccagcacgccccggccccgccccagccctcctgatccctcgcagcccggctccggccgcccgcctctgccgccgcaatgatgatgatggcgctgagcaagaccttcgggcagaagcccgtgaagttccagctggaggacgacggcgagttctacatgatcggctccgaggtgggaaactacctccgtatgttccgaggttctctgtacaagagatacccctcactctggaggcgactagccactgtggaagagaggaagaaaatagttgcatcgtcacatggtaaaaaaacaaaacctaacactaaggatcacggatacacgactctagccaccagtgtgaccctgttaaaagcctcggaagtggaagagattctggatggcaacgatgagaagtacaaggctgtgtccatcagcacagagccccccacctacctcagggaacagaaggccaagaggaacagccagtgggtacccaccctgcccaacagctcccaccacttagatgccgtgccatgctccacaaccatcaacaggaaccgcatgggccgagacaagaagagaaccttccccctttgctttgatgaccatgacccagctgtgatccatgagaacgcatctcagcccgaggtgctggtccccatccggctggacatggagatcgatgggcagaagctgcgagacgccttcacctggaacatgaatgagaagttgatgacgcctgagatgttttcagaaatcctctgtgacgatctggatttgaacccgctgacgtttgtgccagccatcgcctctgccatcagacagcagatcgagtcctaccccacggacagcatcctggaggaccagtcagaccagcgcgtcatcatcaagctgaacatccatgtgggaaacatttccctggtggaccagtttgagtgggacatgtcagagaaggagaactcaccagagaagtttgccctgaagctgtgctcggagctggggttgggcggggagtttgtcaccaccatcgcatacagcatccggggacagctgagctggcatcagaagacctacgccttcagcgagaaccctctgcccacagtggagattgccatccggaacacgggcgatgcggaccagtggtgcccactgctggagactctgacagacgctgagatggagaagaagatccgcgaccaggacaggaacacgaggcggatgaggcgtcttgccaacacggccccggcctggtaaccagcccatcagcacacggctcccacggagcatctcagaagattgggccgcctctcctccatcttctggcaaggacagaggcgaggggacagcccagcgccatcctgaggatcgggtgggggtggagtgggggcttccaggtggcccttcccggcacacattccatttgttgagccccagtcctgccccccaccccaccctccctacccctccccagtctctggggtcaggaagaaaccttattttaggttgtgttttgtttttgtataggagccccaggcagggctagtaacagtttttaaataaaaggcaacaggtcatgttcaatttcttcaacaggtcatgttcaatttcttcaaagttttaacataaaaataatgagagccaggagtggggccggggcctggggggacgaaggtggtatgtgaacaaggttggcacacaggcctcaccctcctctgcctcagattcccaagtgggcaggtgggggtgaatggggctccgggtagcacctcagctcctctcagctcccctcagcctgttctccttccagacccagagagctgagaagagtagctgtgaggctcagggcaagaggctctctgcctttcaggaacagccctaaccctgctccccttgcttggcctcaggaaggtgccgcgagctctcctgccgtccctgggccgccctggctctgctgtgtccagatggtcaggctactgccagctggggccttgctgctctgaagtcccctgcggagggcccagtcctgtgtgggcactgctgggctgtcgccagcctgggtgcaggagggctgttctagctccagtggcacccatagccaggtcagctggggccctttcccaccccagcaggtgctgtggcctgggccagctcctgccttacaagccagctgtgaggaatatgggaatagccctcccggcctggtgccagctcttggagttgacacggtacagggaggagacacagcccagggtcccttcccagccctgcctccaaggagttcatgtcccctctgttctcatctgtaatagggaggtgtccccattcttcagaatggacacaggatctgggagggcagcaaactggctcgcagctccagccttactgaagagaatgggcacagatccgggcacagatcccagcacagactgctgccaccctcagctgttggcaggtcccatgctgccagggcagggctagggtcagaggctgctgtgctccctggaagtggggtagggccccatgtggggcagaggcagagctctgattagggattggggttcttggtcgctgagatgtgagaggagggctcctttgagcacatgttagcatgggactcttcccagggagtttgcactcagggcctctgccctccatcaaagagtggaactccccagagccccatgcacagcaaggggacagctgggccttactggaaggccttgaacaaaggggaagattcccagcccagctgctcttagacatgaacaggtttcattgctgaggtgtttgttctgtccatgaggtaggaacctcggcaatgaaagggtgaggcagccctgtgtctccacaactggggggatggaaggaaccttggctgcctcaccccacaggtcgggcagggccacctggctgggaggtgccgggaaggctgggccctcactcctgaccgccagctcacaccgccgcaaagccatctccacaaggtctggctacaacacggagggcagactcaacagagaacagtgttgttaccatgaaaatgacaacctgtctttggaggaggccccgtgccactgagcatccagaaataaaccacaacatggacaggcttagaacaacaaggaaagctgccaggtcagaagagaaaaatgagccacaggggtcggataaggctcacacacgtcctcagctaaaaagggcaggaacagaaccttccagaagtccctgcctcacccagtctcagaactctgctaaggtgaaaacttaggctctgaggtcatagaaagggcagaagacctagtcctggccctcttctgcacctgaatccatggggctttggcatcaccagatgaaaaatgaggcatacgcccacctgtcagggtggctgatgagagacaggagaggctagattggcatcagcctgaaggcaccactggcaggaacatctgtaggctggtttggcacaacctaggagacgcctgtcctggccccagcagccgaaatctggtgaacttccccgctgactggcaggtagcagaggcctatggtgggcaggacttgcccaaggccctggtggggccaggatgagaaccctgagcctgtcacctgtgagctcaaaagctctgcctggcaacctgtgagctcaaagctctgccaggcaaccatgggcagtttctttgccctctgtgggcacccctatcctaccacctgcagttgggctgagaggccacactgagtgaggacggggcaggcatagaaggatgtggccaggtgagatggggaagccagtgctgtgggccaagagactgcagctcattctgtttattcaggtgggcccttgcatgggcccagcctttaggatgggttttttctgccccaagtaggggtcatgggtaggatggaagctgccagaagcctcttaggcctggccctgggtgggggtcactgctgcgggggtggcagatggggtcctggctgttcctcagggaggggcaggtaattggggtcttctgcaggggcatccaggagcagctttctgtggggaggggcccgtgttgagcacaggccagcacaggtccccatcggtggggatccttctgagggtggggagagggagggagggctctcaacactcacaggaagccaggggtctgcaggagcctcttgcctccaggctggttggggaagacgtcctccaggaagtagtagatatggcccaccgcaatccctgtgagacagccacggactgtggggtcaccctccacagcccagagtcctagaccagcagagcctgccccaggcccccatccacagcctggtggccctgcaggccccacagcatgagtgccccaaagccttgcacagagtgccagccccgggttggccgtgaaggacaagcttaaaaggcccagaagcaggcaggacccagggaggggagggcctgagaatagtggaggagtgggagccatggggcaggaaccctgaccctcccatcctcactcccatcaggaccgtgcaagcatcagtagatccgtcctgacgatgcaaattatgtgggccggctggcttgaggggctgtaagagcacagcagctgggagggcaggaagatggggatggagccaggtgtgaggagaactccagcaaggatgggagaggggccccagggcataagcagcgtgtcctgaggggagtggccagcctggggcggactagatgtaccgggaggctcacccagcaggtccacgaggatggagttgcccagcagcagcgagaagcccatgagcgcccaaggcaggaacggtgcctggaaagtgagcaggccgaagaagttgaccctcacccgagggctgcggcggctccacacgtacaccagcatggccatgagggcctggcccaggaagaacaggctgcccaggagtcccagcagctgggccagagtcaaggtgctccggtgcaggcctcagcccaagcccagggcccctctgacttcccaagaccctggaattcttcccctcatctcccctatgtgctattccctcatcaagatgagccagtccaataaaggcgacacactccacggg

SEQ ID NO: 114 - DNA, 1225 bp, Homo sapiens
  source 1..1225: mol_type = genomic DNA
agctgcacggctcctggccccggagcatgcgcgagagccgccccggagcgccccggagccccccgccgtcccgcccgcggcgtcccgcgccccgccgccagcgcacccccggacgctatggcccacccctccggctggccccttctgtaggatggtagcacacaaccaggtggcagccgacaatgcagtctccacagcagcagagccccgacggcggccagaaccttcctcctcttcctcctcctcgcccgcggcccccgcgcgcccgcggccgtgccccgcggtcccggccccggcccccggcgacacgcacttccgcacattccgttcgcacgccgattaccggcgcatcacgcgcgccagcgcgctcctggacgcctgcggattctactgggggcccctgagcgtgcacggggcgcacgagcggctgcgcgccgagcccgtgggcaccttcctggtgcgcgacagccgccagcggaactgctttttcgcccttagcgtgaagatggcctcgggacccacgagcatccgcgtgcactttcaggccggccgctttcacctggatggcagccgcgagagcttcgactgcctcttcgagctgctggagcactacgtggcggcgccgcgccgcatgctgggggccccgctgcgccagcgccgcgtgcggccgctgcaggagctgtgccgccagcgcatcgtggccaccgtgggccgcgagaacctggctcgcatccccctcaaccccgtcctccgcgactacctgagctccttccccttccagatttgaccggcagcgcccgccgtgcacgcagcattaactgggatgccgtgttattttgttattacttgcctggaaccatgtgggtaccctccccggcctgggttggagggagcggatgggtgtaggggcgaggcgcctcccgccctcggctggagacgaggccgcagaccccttctcacctcttgagggggtcctccccctcctggtgctccctctgggtccccctggttgttgtagcagcttaactgtatctggagccaggacctgaactcgcacctcctacctcttcatgtttacatatacccagtatctttgcacaaaccaggggttgggggagggtctctggctttatttttctgctgtgcagaatcctattttatattttttaaagtcagtttaggtaataaactttattatgaaagttttttttttaaaaaaaaataa

SEQ ID NO: 115 - DNA, 5047 bp, Homo sapiens
  source 1..5047: mol_type = genomic DNA
gaattatgcatgacggcgtgcctcggccaggctggggctgggcgaggattggctgaaggggctgtaattcagcggtttccggagctgcggcggcgcagactgggagggggagccgggggttccgacgtcgcagccgagggaacaagccccaaccggatcctggacaggcaccccggcttggcgctgtctctccccctcggctcggagaggcccttcggcctgagggagcctcgccgcccgtccccggcacacgcgcagccccggcctctcggcctctgccggagaaacagttgggacccctgattttagcaggatggcccaatggaatcagctacagcagcttgacacacggtacctggagcagctccatcagctctacagtgacagcttcccaatggagctgcggcagtttctggccccttggattgagagtcaagattgggcatatgcggccagcaaagaatcacatgccactttggtgtttcataatctcctgggagagattgaccagcagtatagccgcttcctgcaagagtcgaatgttctctatcagcacaatctacgaagaatcaagcagtttcttcagagcaggtatcttgagaagccaatggagattgcccggattgtggcccggtgcctgtgggaagaatcacgccttctacagactgcagccactgcggcccagcaagggggccaggccaaccaccccacagcagccgtggtgacggagaagcagcagatgctggagcagcaccttcaggatgtccggaagagagtgcaggatctagaacagaaaatgaaagtggtagagaatctccaggatgactttgatttcaactataaaaccctcaagagtcaaggagacatgcaagatctgaatggaaacaaccagtcagtgaccaggcagaagatgcagcagctggaacagatgctcactgcgctggaccagatgcggagaagcatcgtgagtgagctggcggggcttttgtcagcgatggagtacgtgcagaaaactctcacggacgaggagctggctgactggaagaggcggcaacagattgcctgcattggaggcccgcccaacatctgcctagatcggctagaaaactggataacgtcattagcagaatctcaacttcagacccgtcaacaaattaagaaactggaggagttgcagcaaaaagtttcctacaaaggggaccccattgtacagcaccggccgatgctggaggagagaatcgtggagctgtttagaaacttaatgaaaagtgcctttgtggtggagcggcagccctgcatgcccatgcatcctgaccggcccctcgtcatcaagaccggcgtccagttcactactaaagtcaggttgctggtcaaattccctgagttgaattatcagcttaaaattaaagtgtgcattgacaaagactctggggacgttgcagctctcagaggatcccggaaatttaacattctgggcacaaacacaaaagtgatgaacatggaagaatccaacaacggcagcctctctgcagaattcaaacacttgaccctgagggagcagagatgtgggaatgggggccgagccaattgtgatgcttccctgattgtgactgaggagctgcacctgatcacctttgagaccgaggtgtatcaccaaggcctcaagattgacctagagacccactccttgccagttgtggtgatctccaacatctgtcagatgccaaatgcctgggcgtccatcctgtggtacaacatgctgaccaacaatcccaagaatgtaaacttttttaccaagcccccaattggaacctgggatcaagtggccgaggtcctgagctggcagttctcctccaccaccaagcgaggactgagcatcgagcagctgactacactggcagagaaactcttgggacctggtgtgaattattcagggtgtcagatcacatgggctaaattttgcaaagaaaacatggctggcaagggcttctccttctgggtctggctggacaatatcattgaccttgtgaaaaagtacatcctggccctttggaacgaagggtacatcatgggctttatcagtaaggagcgggagcgggccatcttgagcactaagcctccaggcaccttcctgctaagattcagtgaaagcagcaaagaaggaggcgtcactttcacttgggtggagaaggacatcagcggtaagacccagatccagtccgtggaaccatacacaaagcagcagctgaacaacatgtcatttgctgaaatcatcatgggctataagatcatggatgctaccaatatcctggtgtctccactggtctatctctatcctgacattcccaaggaggaggcattcggaaagtattgtcggccagagagccaggagcatcctgaagctgacccaggtagcgctgccccatacctgaagaccaagtttatctgtgtgacaccaacgacctgcagcaataccattgacctgccgatgtccccccgcactttagattcattgatgcagtttggaaataatggtgaaggtgctgaaccctcagcaggagggcagtttgagtccctcacctttgacatggagttgacctcggagtgcgctacctcccccatgtgaggagctgagaacggaagctgcagaaagatacgactgaggcgcctacctgcattctgccacccctcacacagccaaaccccagatcatctgaaactactaactttgtggttccagattttttttaatctcctacttctgctatctttgagcaatctgggcacttttaaaaatagagaaatgagtgaatgtgggtgatctgcttttatctaaatgcaaataaggatgtgttctctgagacccatgatcaggggatgtggcggggggtggctagagggagaaaaaggaaatgtcttgtgttgttttgttcccctgccctcctttctcagcagctttttgttattgttgttgttgttcttagacaagtgcctcctggtgcctgcggcatccttctgcctgtttctgtaagcaaatgccacaggccacctatagctacatactcctggcattgcactttttaaccttgctgacatccaaatagaagataggactatctaagccctaggtttctttttaaattaagaaataataacaattaaagggcaaaaaacactgtatcagcatagcctttctgtatttaagaaacttaagcagccgggcatggtggctcacgcctgtaatcccagcactttgggaggccgaggcggatcataaggtcaggagatcaagaccatcctggctaacacggtgaaaccccgtctctactaaaagtacaaaaaattagctgggtgtggtggtgggcgcctgtagtcccagctactcgggaggctgaggcaggagaatcgcttgaacctgagaggcggaggttgcagtgagccaaaattgcaccactgcacactgcactccatcctgggcgacagtctgagactctgtctcaaaaaaaaaaaaaaaaaaaagaaacttcagttaacagcctccttggtgctttaagcattcagcttccttcaggctggtaatttatataatccctgaaacgggcttcaggtcaaacccttaagacatctgaagctgcaacctggcctttggtgttgaaataggaaggtttaaggagaatctaagcattttagacttttttttataaatagacttattttcctttgtaatgtattggccttttagtgagtaaggctgggcagagggtgcttacaaccttgactccctttctccctggacttgatctgctgtttcagaggctaggttgtttctgtgggtgccttatcagggctgggatacttctgattctggcttccttcctgccccaccctcccgaccccagtccccctgatcctgctagaggcatgtctccttgcgtgtctaaaggtccctcatcctgtttgttttaggaatcctggtctcaggacctcatggaagaagagggggagagagttacaggttggacatgatgcacactatggggccccagcgacgtgtctggttgagctcagggaatatggttcttagccagtttcttggtgatatccagtggcacttgtaatggcgtcttcattcagttcatgcagggcaaaggcttactgataaacttgagtctgccctcgtatgagggtgtatacctggcctccctctgaggctggtgactcctccctgctggggccccacaggtgaggcagaacagctagagggcctccccgcctgcccgccttggctggctagctcgcctctcctgtgcgtatgggaacacctagcacgtgctggatgggctgcctctgactcagaggcatggccggatttggcaactcaaaaccaccttgcctcagctgatcagagtttctgtggaattctgtttgttaaatcaaattagctggtctctgaattaagggggagacgaccttctctaagatgaacagggttcgccccagtcctcctgcctggagacagttgatgtgtcatgcagagctcttacttctccagcaacactcttcagtacataataagcttaactgataaacagaatatttagaaaggtgagacttgggcttaccattgggtttaaatcatagggacctagggcgagggttcagggcttctctggagcagatattgtcaagttcatggccttaggtagcatgtatctggtcttaactctgattgtagcaaaagttctgagaggagctgagccctgttgtggcccattaaagaacagggtcctcaggccctgcccgcttcctgtccactgccccctccccatccccagcccagccgagggaatcccgtgggttgcttacctacctataaggtggtttataagctgctgtcctggccactgcattcaaattccaatgtgtacttcatagtgtaaaaatttatattattgtgaggttttttgtcttttttttttttttttttttttggtatattgctgtatctactttaacttccagaaataaacgttatataggaaccgtc

SEQ ID NO: 116 - DNA, 4034 bp, Homo sapiens
  source 1..4034: mol_type = genomic DNA
tttctcttctctgtgtcgtcagagctccagggagggacctgggtagaaggagaagccggaaacagcgggctggggcagccactgcttacactgaagagggaggacgggagaggagtgtgtgtgtgtgtgtgtgtgtgtgtgtgtatgtatgtgtgtgctttatcttatttttctttttggtggtggtggtggaaggggggaggtgctagcagggccagccttgaactcgctggacagagctacagacctatggggcctggaagtgcccgctgagaaagggagaagacagcagaggggttgccgaggcaacctccaagtcccagatcatgtctctgtggggtctggtctccaagatgcccccagaaaaagtgcagcggctctatgtcgactttccccaacacctgcggcatcttctgggtgactggctggagagccagccctgggagttcctggtcggctccgacgccttctgctgcaacttggctagtgccctactttcagacactgtccagcaccttcaggcctcggtgggagagcagggggaggggagcaccatcttgcaacacatcagcacccttgagagcatatatcagagggaccccctgaagctggtggccactttcagacaaatacttcaaggagagaaaaaagctgttatggaacagttccgccacttgccaatgcctttccactggaagcaggaagaactcaagtttaagacaggcttgcggaggctgcagcaccgagtaggggagatccaccttctccgagaagccctgcagaagggggctgaggctggccaagtgtctctgcacagcttgatagaaactcctgctaatgggactgggccaagtgaggccctggccatgctactgcaggagaccactggagagctagaggcagccaaagccctagtgctgaagaggatccagatttggaaacggcagcagcagctggcagggaatggcgcaccgtttgaggagagcctggccccactccaggagaggtgtgaaagcctggtggacatttattcccagctacagcaggaggtaggggcggctggtggggagcttgagcccaagacccgggcatcgctgactggccggctggatgaagtcctgagaaccctcgtcaccagttgcttcctggtggagaagcagcccccccaggtactgaagactcagaccaagttccaggctggagttcgattcctgttgggcttgaggttcctgggggccccagccaagcctccgctggtcagggccgacatggtgacagagaagcaggcgcgggagctgagtgtgcctcagggtcctggggctggagcagaaagcactggagaaatcatcaacaacactgtgcccttggagaacagcattcctgggaactgctgctctgccctgttcaagaacctgcttctcaagaagatcaagcggtgtgagcggaagggcactgagtctgtcacagaggagaagtgcgctgtgctcttctctgccagcttcacacttggccccggcaaactccccatccagctccaggccctgtctctgcccctggtggtcatcgtccatggcaaccaagacaacaatgccaaagccactatcctgtgggacaatgccttctctgagatggaccgcgtgccctttgtggtggctgagcgggtgccctgggagaagatgtgtgaaactctgaacctgaagttcatggctgaggtggggaccaaccgggggctgctcccagagcacttcctcttcctggcccagaagatcttcaatgacaacagcctcagtatggaggccttccagcaccgttctgtgtcctggtcgcagttcaacaaggagatcctgctgggccgtggcttcaccttttggcagtggtttgatggtgtcctggacctcaccaaacgctgtctccggagctactggtctgaccggctgatcattggcttcatcagcaaacagtacgttactagccttcttctcaatgagcccgacggaacctttctcctccgcttcagcgactcagagattgggggcatcaccattgcccatgtcatccggggccaggatggctctccacagatagagaacatccagccattctctgccaaagacctgtccattcgctcactgggggaccgaatccgggatcttgctcagctcaaaaatctctatcccaagaagcccaaggatgaggctttccggagccactacaagcctgaacagatgggtaaggatggcaggggttatgtcccagctaccatcaagatgaccgtggaaagggaccaaccacttcctaccccagagctccagatgcctaccatggtgccttcttatgaccttggaatggcccctgattcctccatgagcatgcagcttggcccagatatggtgccccaggtgtacccaccacactctcactccatccccccgtatcaaggcctctccccagaagaatcagtcaacgtgttgtcagccttccaggagcctcacctgcagatgccccccagcctgggccagatgagcctgccctttgaccagcctcacccccagggcctgctgccgtgccagcctcaggagcatgctgtgtccagccctgaccccctgctctgctcagatgtgaccatggtggaagacagctgcctgagccagccagtgacagcgtttcctcagggcacttggattggtgaagacatattccctcctctgctgcctcccactgaacaggacctcactaagcttctcctggaggggcaaggggagtcggggggagggtccttgggggcacagcccctcctgcagccctcccactatgggcaatctgggatctcaatgtcccacatggacctaagggccaaccccagttggtgatcccagctggagggagaacccaaagagacagctcttctactacccccacagacctgctctggacacttgctcatgccctgccaagcagcagatggggagggtgccctcctatccccacctactcctgggtcaggaggaaaagactaacaggagaatgcacagtgggtggagccaatccactccttcctttctatcattcccctgcccacctccttccagcactgactggaagggaagttcaggctctgagacacaccccaacatgcctgcacctgcagcgcgcacacgcacgcacacacacatacagagctctctgagggtgatggggctgagcaggaggggggctgggtaagagcacaggttagggcatggaaggcttctccgcccattctgacccagggcctaggacggataggcaggaacatacagacacatttacactagaggccagggatagaggatattgggtctcagccctaggggaatgggaagcagctcaagggaccctgggtgggagcataggaggggtctggacatgtggttactagtacaggttttgccctgattaaaaaatctcccaaagccccaaattcctgttagccaggtggaggcttctgatacgtgtatgagactatgcaaaagtacaagggctgagattcttcgtgtatagctgtgtgaacgtgtatgtacctaggatatgttaaatgtatagctggcaccttagttgcatgaccacatagaacatgtgtctatctgcttttgcctacgtgacaacacaaatttgggagggtgagacactgcacagaagacagcagcaagtgtgctggcctctctgacatatgctaacccccaaatactctgaatttggagtctgactgtgcccaagtgggtccaagtggctgtgacatctacgtatggctccacacctccaatgctgcctgggagccagggtgagagtctgggtccaggcctggccatgtggccctccagtgtatgagagggccctgcctgctgcatcttttctgttgccccatccaccgccagcttcccttcactcccctatcccattctccctctcaaggcaggggtcatagatcctaagccataaaataaattttattccaaaataacaaaataaataatctactgtacacaatctgaaaa

SEQ ID NO: 117 - DNA, 7948 bp, Homo sapiens
  source 1..7948: mol_type = genomic DNA
gcgcggcagccgggccttgctccgggacgtgtttatttgtaacttagtgctttttatcgtcttaaggaggtatttggtggaggctctttgaagttgggttcaggagtgtagaattggcaaagttattgccagcttcctgcatcaacaacagcaacttgtgattggcggtgaccggatattcagttgcacatccccacatcaatgcactgccaatgggttatatcctgtgttgtgacctcatggtttaagtgggaataaagatgagtataagcagtgatgaggtcaacttcttggtatatagatacttgcaagagtcaggattttctcattcagcatttacctttggtatagaaagccatatcagtcagtccaatataaatggtgccctcgtcccacccgctgcattgatttctatcatccagaaaggtctacagtatgtagaagcagaagttagtattaatgaggatggtaccttgtttgatggtcgaccaatagagtctctgtccctgatagatgccgtaatgcctgatgtagtacaaacaagacaacaagcttatagagataagcttgcacagcaacaggcagcagctgctgcagctgccgcagctgcagccagccaacaaggatctgcaaaaaatggagaaaacacagcaaatggggaggagaatggagcacatactatagcaaataatcatactgatatgatggaagtggatggggatgttgaaatccctcctaataaagctgttgtgttgcggggccatgaatctgaagtttttatctgtgcctggaaccctgttagtgatctcctagcatcagggtctggagactcaacagcaagaatatggaatcttagtgagaacagcaccagtggctctacacagttagtacttagacattgtatacgagaaggagggcaagatgttccaagcaacaaggatgtcacatctctagattggaatagtgaaggtacacttctagcaactggttcctatgatgggtttgccagaatatggactaaagatggtaaccttgctagcaccttagggcagcataaaggccctatatttgcattaaaatggaataagaaaggaaatttcatcctaagtgctggagtagacaagactacaattatttgggacgcacatactggtgaagccaagcaacagtttccttttcattcagcaccagcattggatgttgattggcagagcaacaacacctttgcttcttgtagtacagatatgtgcattcatgtctgtaaattaggacaagacagacctattaaaacattccaaggacatacgaatgaagtaaatgctatcaaatgggacccaactggcaatctcttggcctcctgttctgacgacatgactttaaagatatggagtatgaaacaagacaattgtgtccatgatttgcaagcacataataaagaaatttatactatcaaatggagtccaacaggaccagggactaataatccaaatgccaaccttatgttagcaagtgcatcctttgattctactgttaggttatgggatgtagaccgagggatatgcatccataccttgacaaaacaccaagagcctgtgtacagtgtagctttcagtcctgatggcaggtatctggcaagtggttcttttgacaaatgtgtacacatctggaacacgcagacaggtgctctagttcacagctataggggaacaggtggaatatttgaagtttgctggaatgcagcaggagacaaagttggagccagtgcatcagatggttcagtttgtgtattagaccttcggaaatagcgctactagttggaagccatggaccgactatgaatgtgtacatagccaaaatgactgtccctgacccatgtactgctatagtcccacttgaaccatggccagtccactacagccaaatctaaaagaaatatatacatacagtgtatataaacaaaattgcaccctgaagatgacagagttttgtcacagcttgtgaattctgttcaccaagtgctggaatctaatctgctgtgcccctaaaatagcatttagaagttttggatatgaaaaacagaagagagaaaaatatacattataaaagcagaacatacatgtaccagtttttggatactaaatgacagccttgtttctcccctttgaatcagcagacaccatggattatattctttttttcccttcagtagtgagcagtttgtatgtacagagaaaatggacttacaaaaacttgcagcagtagtttgttcttgctttaaaatttcgtttttggtttagattatggatgcatgaagtaagggagtgaatcagtttcttgtttatatttttttcaccttttaaacaaaaaattctttaaaatattttaatgcattcttttgaagaggtagatgtttggtacattttatggctcccagagcatatattcagttggtgcatgttgtggaagggggaattggaaattaaatgaaaacctatgactttggtcatgtcaatctgtaagacacatcagtaaaagggtattatgctctgttggttttgtttttttgttttgctttttttttttttttttcttttttgttttttggtgatgtggcttaaatgcaatagtttcttttttgggacatatttctgccaattaaagactagaagggcacaactttttttttaattaccatagagaagatacattaaaaaaaatcttctgatgttttgtagccataactaaattatggtaaaaatgtgcactattgtgaaaaggagcaacgtagttttgggttttttgttgtttgtttgttttgctttgttttttaagagattaaaatgtttctggataaggattagcttctcgaagtgtccatcattctgtgtagaagcttaaatatgtaatgtaaccaaactccagtattaaaaatctctcatgttgttttctttatacaaagcaagataacggcatataacactgccattacatggcaaaatgtttgctaccttagtttaaaaaacaatctcaaacaaaagacttgcttcaaggtgtttttaaatagcagtgattcagaattttttttaatgaaagtataattgcactaaccttcttcctgctgctctgattctgcatttgtggtacttgtgactacgttttttcaaatatagatagatttaagctgctaatttttttttttttagtaatcactactatatcatgtcttttactctgtttataatatcaagtattttcttaaagatatagatattaaaccttgtgctcatgcaacttagagtaacatatacagacaaatgattgcatgaggccatgtttatatgtgtgactaataaggcttgtcatgattaacataatccaggtatgtcatttctgaagagaatagtcatcaaatttatatctcgaagattttaattaaggaattgcttattgttgagcttagcaaattaataacactatttctgtcactaattattttgaggccttttagtactaaaattttaacctgtgttctaagtagaaactgatttaacccaagtaatgcagctttgattgatttcagcattcgttgctttgctatttttacaaaacagcattgattgaagcaagtcttggttttactaaggtagggtagcatttgctattggtaaagagaataaatacacttaatttcacaatacattgttatatgtaccccagttgttgttagtggggactatgatactgtaataatatttttaaaaatttacatcaagagaggcagtcattcacgatggttttgtgccagctctttttagggttttggatcacattagagatatttagaacatattaccctgtgacttacgtaggaaacctaatatgctgagtatctggcacttgaattcctgcttttattgctggaggtccacatctgtggttgacctctgttattgtttaaaaaaaataaataaaaattaaaaaaatctgtgcaataattttaaaatgtgctcccaggaatagacacaaatgttttgagtatcttttaagctgcattttcctttagtgatgcatttgtcaattgcactgaatttaaatctgaaagtcagaggtgattattgatagtacttttgtattttgatatggacagtttattcatttgcatacagttattgactttttcccagctgattaaaagatagtcaagaaattctgcaatatagctgccaaaatagacagctacatttttatgatattgtcatcttttctgttttttttttcttttttttctttagctattttacttaagcataatagccacaataggacatataaaagattataaatacagagctttattatcctgacgtcttgggtcttttaagtatatacttttctgaaaggtatccattttgtaggcttgggttcttcatgagcatacgattgtttatttttgctgctgttctcaacatcatcattgcctgctgatgtgccacgatgctgctccaatagacagcaataagattgtctctaatttgagcagtaacatgattgcaagagaccaagtttcacagcttgtaaagttctgtatttgggattcttgcttatttttccgcctgtgtttttctgagaacttattcctgatgatcaattgaatccagtagtttttctatgctatttgttgttgtataagctactgtaagaaacttatcataaggaaaaatagaaaggaaaacttgaatcaatactcattgattaaaatggaataaagaaagagcagctgccacttttaaacaacataaaggaatatctttttttgtctccgtgtaggaaatcccataagttcttatatttgttccagttcccatttcctgccattgaccagataacatcattgactttcaaatgacttttagaagtgataactcttaatttcctaatagatactagattgtattgaattctgttttaattattctctaggtaagtatgttttaggattaaataccttttacagatactgaaagtgcctccttttgtggtgtaaaaaacaaattatggtgcaaaaagtaatcactagattgaaatacatgaaggttttttgctttttgacatacgaaaatgtcaagagaaaggccaaagatttgtactttttcacttacaaagcactcctttttcccttaaacttctttctgtcaaattagatttaatgagagagtactatttttaaggagctatctgtttatgtagaatgattttgttaagagtaatgtaaactattattgagtagaggcctaaagaggactgtgcatttttgctatttaaaggaatcacaaatgatcatacttaagtgagcaaaaatgacaagttttactagctaagtagagaaataaatctcaaatgcagcgctacaattttcattatcttaagtacattgtacatttctacagaacctgtgattattctcgcatgataaggatggtacttgcatatggtgaattactactgttgacagtttccgcagaaatcctatttcagtggaccaacattgtggcatggcagcaaatgccaacattttgtggaatagcagcaaatctacaagagaccctggttggtttttcgttttgttttctttgttttttcccccttctcctgaatcagcagggatggaaggagggtagggaagttatgaattactccttccagtagtagctctgaagtgtcacatttaatatcagttttttttaaacatgattctagttaaatgtagaagagagaagaaagaggaagtgttcacttttttaatacactgatttagaaatttgatgtcttatatcagtagttctgaggtattgatagcttgctttatttctgcctttacgttgacagtgttgaagcagggtgaataactagggcatatattttttttttttttgtaagctgtttcatgatgttttctttggaatttccggataagttcaggaaaacattctgcatgttgtatctagtctgatgtacttatccatctcattacaaacaaaaacacacagactgcatttgtagctctgtaatccttgaatacggaagtaaattttcttctttcctgactttgacattgtagctatactgtttccatttttgtttttacaaatcctttgggtctaattctgtgagcctacctatagcactggattaaaatgtctgcatcatttctttagttatccagttaactttaaaactgttgtaaaagtgtaaaccagcccatgacaggtttttgtacatgttaaagaacttcattgttcagttttcatgattattgtgtaaggaagactgatgtagatgttctgtgctgtcctggaccatgttaattacacttacgacgtattttagttccacatcacaatgatttgtccccagtgacccttttatcctttctaggcacatttcttgttgttgttgttgttgcagttcccctttgcattgtattgctttgacaactgtaatttgaatcagatctgaaagaggtccagaataaaatatattttgatattatgttggctgtgtacatatataaaacctttgatgtctatgtagtttatatagactatttactagtcaggtaaagagagagggatggtatttcttgtttacagtttgtttacattttaattgcttttacttctccagtgttctattgtagaataaacctttttttccaagttagccttcataacctataacacattcattctctcccatactggtgttactgattaataactgccatcagaacccaaaccactgtttttcataaacgtattgtttcccaagatatatactttaagcccataataaaattacaaattttactatttttattacttcttgcaggagataagatttttttaaatgaaggggttatttactatttttattaaagtataatagagcatctaatcagctaagggattgtaatttttaattcttttgaaaaataaatattgtatttaaaagacgttatttcacagaagctgaaaaagagaccttagataacatttgtttggttagccacacggttgagcacaaaacaatgtgtagatgtgttgaagattagggcaggaggctcaacttctcggtgacctttttttgcttcacaacaagccaattatagttgaatcattttctctcttagctagttgttactacaaactttataagaaaaacaactagacaccttctagttttaattaataccaactcctttagagttagagactttttaaaaagaatcattgagcatattttcttttttttttttttaagaatttacactctctaggtcttctatttttcctgtttatttccttaaacagaaataaattcaagcatagttttatgttttattagaaataagccactgcagttgctagaactgacatgctttcattttcaaggggttaacttttattgcatggcatagattattagtaatatcctgcattgtatacttttccaaaaagggttggactcctaaggattagaatccttataagcttgagggaaagctgaaactaatttgaacagtaatagaagggattatttttaatttcatagttaacactttacaatggattagatttattacctagtataatccgtagcagatcagatcaaagtttactgttttaccaatatattcatttgaaaaaatacagtggaggaaaagacactttagatggtagttttatggtgcttttctctgctgtaccaaagtgctttgtcatcaatgaaatgttaaccctatgctactttttctgcatgcttcttaaatgtcatcttaatgcttaattgtcctaacttgtaatatttttgtattaaatttttttaggagttccttgtaatttctttacaatttaaaatatattaaacacaaagtgtttagtaaagtaca

SEQ ID NO: 118 - DNA, 2815 bp, Homo sapiens
  source 1..2815: mol_type = genomic DNA
gcccaggtgactgactaatccgccgccttcaggagacagaattggccaaggcctgaaggccccggagtgcaccagcggcatgtacaaagagaccgtctactccgccttcaatctgctcatgcattacccacccccctcgggagcagggcagcacccccagccgcagcccccgctgcacaaggccaatcagcccccccacggtgtcccccaactctctctctacgaacatttcaacagcccacatcccacccctgcacctgcggacatcagccagaagcaagttcacaggcctctgcagacccctgacctctctggcttctactccctgacctcaggcagcatggggcagctcccccacactgtgagctggttcacccacccatccttgatgctaggttctggtgtacctggtcacccagcagccatcccccacccggccattgtgcccccctcagggaagcaggagctgcagcccttcgaccgcaacctgaagacacaagcagagtccaaggcagagaaggaggccaagaagccaaccatcaagaagcccctcaatgccttcatgctgtacatgaaggagatgagagccaaggtcattgcagagtgcacacttaaggagagcgctgccatcaaccagatcctgggccgcaggtggcacgcgctgtcgcgagaagagcaggccaagtactatgagctggcccgcaaggagaggcagctgcacatgcagctatacccaggctggtcagcgcgggacaactacgggaagaagaagaggcggtcgagggaaaagcaccaagaatccaccacaggaggaaaaagaaatgcattcggtacttacccggagaaggccgctgccccagccccgttccttccgatgacagtgctctaggctgccccgggtccccagctccccaggactcaccctcataccatctgctgccccgcttccccacagaactgcttactagccctgcggagccggcacctacatccccaggtctctccactgctctcagcctcccaaccccagggcccccacaggccccccgcagcaccctgcagagcacacaggtacagcaacaggaatctcagagacaggtggcctagcaggcacaggacacctggccgcctccaggagcctaccccctgaaagtgacagagacccagatctcatggaaactggccaggggtcctgttaacgtcatctcagggtccagaccctgaagatttcagaggctgcaggacttctgcctgaacctggggtcatcgattcaaactgctccaagtggtgggaatcagatctgtcttgatgtgtcatctaattaagggaatcccttgtacctatggctgcctgcatctattctttgtaccatctgtcttgccagccagaagcctctgcctccctagcttttctgctataggtcagagatgggctgaactgagcctagctaccttctctacccatctcccccatcccccactgccacaccctccccattcagacacttcatggaccaagaatgagctggtttgtcaaacaacatgtgagcatggtcacaagcacaaagctcaagatgacagctcttctaaggaaatggagaagctctgtttataaaaacaaaaacaaaaccagctgctactcataagttggaccagaggaagccccttactatgatctcaggagcttgcaagaagcaggaaggggaatggaataggttaagtttaggcctatcaacctaagcaacagaaataatctgacactaccttatcaggcaaattggggaggggagggtgtatctagctctagttcaaattatttggaagtgttccctgagaaacccaccagcctaagaagctctggccccaggcttgtcactagcagctgcagtcaacagttcaaagaagtcatggcccaaatccagtgtgcacccctccccattcacagagcctttttcacaattccatttccagttcatctatggcagtccagccagctcctgggcagcttgagagggcaaacccaaaacctcatgacagccagagcctgtctttcagcattcagtccgcctggccggctccagtttccccatggggctgcgggacagaggaccattacaactagatcaaggagcccagaaaacctccagtagtggacaacaggttttcaccatagcctacgttaacccatttttgagccaagcttcaaccctcagccttgaaaaacaagtctttaatttaatttttgttttttgcctaaatccaaagaaaaagggctgccgggccaggcgcggtggctcacgcctgtaatcccagcactttggcaggccgaggcaggtggatcacctgacgtcagtagtttgagaccagcctggccaacatggtgaaaccctgtatctactaaaaatacaaaaattagccggacgtggtggtgcgcgcatgtaatcccagctactcgggaggctgaggcggaagaatcacttgaacccgggaggcggaggttccagtgagccgagatggcgctattgcactccagtctgggtaacagggagactgcatctcaaaaaaaaaaaaaaaaaaaaaaaagggctgtccatgtattcacacacccctcaaaaaaagcctttagttcctactttagccactggtttctcagaatccaaagatcacatattctagtgtaacactgcaagaagtcttgagaaaaagattattgtagtgttcaaaatatttttgtattgttaatgcatcatcatagaaaaacttttaaacatgagaataaagatactttttactgggtttgtttttcaaagcctga

SEQ ID NO: 119 - DNA, 9679 bp, Homo sapiens
  source 1..9679: mol_type = genomic DNA
gcggccgccccgagacgccggccccgctgagtgatgagaacagacgtcaaactgccttatgaatattgatgcggaggctaggctgctttcgtagagaagcagaaggaagcaagatggctgccctttaggatttgttagaaaggagacccgactgcaactgctggattgctgcaaggctgagggacgagaacgaggctggcaaacattcagcagcacaccctctcaagattgtttacttgcctttgctcctgttgagttacaacgcttggaagcaggagatgggctcagcagcagccaataggacatgatccaggaagagcagtaagggactgagctgctgaattcaactagagggcagccttgtggatggccccgaagcaagcctgatggaacaggatagaaccaaccatgttgagggcaacagactaagtccattcctgataccatcacctcccatttgccagacagaacctctggctacaaagctccagaatggaagcccactgcctgagagagctcatccagaagtaaatggagacaccaagtggcactctttcaaaagttattatggaataccctgtatgaagggaagccagaatagtcgtgtgagtcctgactttacacaagaaagtagagggtattccaagtgtttgcaaaatggaggaataaaacgcacagttagtgaaccttctctctctgggctccttcagatcaagaaattgaaacaagaccaaaaggctaatggagaaagacgtaacttcggggtaagccaagaaagaaatccaggtgaaagcagtcaaccaaatgtctccgatttgagtgataagaaagaatctgtgagttctgtagcccaagaaaatgcagttaaagatttcaccagtttttcaacacataactgcagtgggcctgaaaatccagagcttcagattctgaatgagcaggaggggaaaagtgctaattaccatgacaagaacattgtattacttaaaaacaaggcagtgctaatgcctaatggtgctacagtttctgcctcttccgtggaacacacacatggtgaactcctggaaaaaacactgtctcaatattatccagattgtgtttccattgcggtgcagaaaaccacatctcacataaatgccattaacagtcaggctactaatgagttgtcctgtgagatcactcacccatcgcatacctcagggcagatcaattccgcacagacctctaactctgagctgcctccaaagccagctgcagtggtgagtgaggcctgtgatgctgatgatgctgataatgccagtaaactagctgcaatgctaaatacctgttcctttcagaaaccagaacaactacaacaacaaaaatcagtttttgagatatgcccatctcctgcagaaaataacatccagggaaccacaaagctagcgtctggtgaagaattctgttcaggttccagcagcaatttgcaagctcctggtggcagctctgaacggtatttaaaacaaaatgaaatgaatggtgcttacttcaagcaaagctcagtgttcactaaggattccttttctgccactaccacaccaccaccaccatcacaattgcttctttctccccctcctcctcttccacaggttcctcagcttccttcagaaggaaaaagcactctgaatggtggagttttagaagaacaccaccactaccccaaccaaagtaacacaacacttttaagggaagtgaaaatagagggtaaacctgaggcaccaccttcccagagtcctaatccatctacacatgtatgcagcccttctccgatgctttctgaaaggcctcagaataattgtgtgaacaggaatgacatacagactgcagggacaatgactgttccattgtgttctgagaaaacaagaccaatgtcagaacacctcaagcataacccaccaatttttggtagcagtggagagctacaggacaactgccagcagttgatgagaaacaaagagcaagagattctgaagggtcgagacaaggagcaaacacgagatcttgtgcccccaacacagcactatctgaaaccaggatggattgaattgaaggcccctcgttttcaccaagcggaatcccatctaaaacgtaatgaggcatcactgccatcaattcttcagtatcaacccaatctctccaatcaaatgacctccaaacaatacactggaaattccaacatgcctggggggctcccaaggcaagcttacacccagaaaacaacacagctggagcacaagtcacaaatgtaccaagttgaaatgaatcaagggcagtcccaaggtacagtggaccaacatctccagttccaaaaaccctcacaccaggtgcacttctccaaaacagaccatttaccaaaagctcatgtgcagtcactgtgtggcactagatttcattttcaacaaagagcagattcccaaactgaaaaacttatgtccccagtgttgaaacagcacttgaatcaacaggcttcagagactgagccattttcaaactcacaccttttgcaacataagcctcataaacaggcagcacaaacacaaccatcccagagttcacatctccctcaaaaccagcaacagcagcaaaaattacaaataaagaataaagaggaaatactccagacttttcctcacccccaaagcaacaatgatcagcaaagagaaggatcattctttggccagactaaagtggaagaatgttttcatggtgaaaatcagtattcaaaatcaagcgagttcgagactcataatgtccaaatgggactggaggaagtacagaatataaatcgtagaaattccccttatagtcagaccatgaaatcaagtgcatgcaaaatacaggtttcttgttcaaacaatacacacctagtttcagagaataaagaacagactacacatcctgaactttttgcaggaaacaagacccaaaacttgcatcacatgcaatattttccaaataatgtgatcccaaagcaagatcttcttcacaggtgctttcaagaacaggagcagaagtcacaacaagcttcagttctacagggatataaaaatagaaaccaagatatgtctggtcaacaagctgcgcaacttgctcagcaaaggtacttgatacataaccatgcaaatgtttttcctgtgcctgaccagggaggaagtcacactcagacccctccccagaaggacactcaaaagcatgctgctctaaggtggcatctcttacagaagcaagaacagcagcaaacacagcaaccccaaactgagtcttgccatagtcagatgcacaggccaattaaggtggaacctggatgcaagccacatgcctgtatgcacacagcaccaccagaaaacaaaacatggaaaaaggtaactaagcaagagaatccacctgcaagctgtgataatgtgcagcaaaagagcatcattgagaccatggagcagcatctgaagcagtttcacgccaagtcgttatttgaccataaggctcttactctcaaatcacagaagcaagtaaaagttgaaatgtcagggccagtcacagttttgactagacaaaccactgctgcagaacttgatagccacaccccagctttagagcagcaaacaacttcttcagaaaagacaccaaccaaaagaacagctgcttctgttctcaataattttatagagtcaccttccaaattactagatactcctataaaaaatttattggatacacctgtcaagactcaatatgatttcccatcttgcagatgtgtagagcaaattattgaaaaagatgaaggtcctttttatacccatctaggagcaggtcctaatgtggcagctattagagaaatcatggaagaaaggtttggacagaagggtaaagctattaggattgaaagagtcatctatactggtaaagaaggcaaaagttctcagggatgtcctattgctaagtgggtggttcgcagaagcagcagtgaagagaagctactgtgtttggtgcgggagcgagctggccacacctgtgaggctgcagtgattgtgattctcatcctggtgtgggaaggaatcccgctgtctctggctgacaaactctactcggagcttaccgagacgctgaggaaatacggcacgctcaccaatcgccggtgtgccttgaatgaagagagaacttgcgcctgtcaggggctggatccagaaacctgtggtgcctccttctcttttggttgttcatggagcatgtactacaatggatgtaagtttgccagaagcaagatcccaaggaagtttaagctgcttggggatgacccaaaagaggaagagaaactggagtctcatttgcaaaacctgtccactcttatggcaccaacatataagaaacttgcacctgatgcatataataatcagattgaatatgaacacagagcaccagagtgccgtctgggtctgaaggaaggccgtccattctcaggggtcactgcatgtttggacttctgtgctcatgcccacagagacttgcacaacatgcagaatggcagcacattggtatgcactctcactagagaagacaatcgagaatttggaggaaaacctgaggatgagcagcttcacgttctgcctttatacaaagtctctgacgtggatgagtttgggagtgtggaagctcaggaggagaaaaaacggagtggtgccattcaggtactgagttcttttcggcgaaaagtcaggatgttagcagagccagtcaagacttgccgacaaaggaaactagaagccaagaaagctgcagctgaaaagctttcctccctggagaacagctcaaataaaaatgaaaaggaaaagtcagccccatcacgtacaaaacaaactgaaaacgcaagccaggctaaacagttggcagaacttttgcgactttcaggaccagtcatgcagcagtcccagcagccccagcctctacagaagcagccaccacagccccagcagcagcagagaccccagcagcagcagccacatcaccctcagacagagtctgtcaactcttattctgcttctggatccaccaatccatacatgagacggcccaatccagttagtccttatccaaactcttcacacacttcagatatctatggaagcaccagccctatgaacttctattccacctcatctcaagctgcaggttcatatttgaattcttctaatcccatgaacccttaccctgggcttttgaatcagaatacccaatatccatcatatcaatgcaatggaaacctatcagtggacaactgctccccatatctgggttcctattctccccagtctcagccgatggatctgtataggtatccaagccaagaccctctgtctaagctcagtctaccacccatccatacactttaccagccaaggtttggaaatagccagagttttacatctaaatacttaggttatggaaaccaaaatatgcagggagatggtttcagcagttgtaccattagaccaaatgtacatcatgtagggaaattgcctccttatcccactcatgagatggatggccacttcatgggagccacctctagattaccacccaatctgagcaatccaaacatggactataaaaatggtgaacatcattcaccttctcacataatccataactacagtgcagctccgggcatgttcaacagctctcttcatgccctgcatctccaaaacaaggagaatgacatgctttcccacacagctaatgggttatcaaagatgcttccagctcttaaccatgatagaactgcttgtgtccaaggaggcttacacaaattaagtgatgctaatggtcaggaaaagcagccattggcactagtccagggtgtggcttctggtgcagaggacaacgatgaggtctggtcagacagcgagcagagctttctggatcctgacattgggggagtggccgtggctccaactcatgggtcaattctcattgagtgtgcaaagcgtgagctgcatgccacaacccctttaaagaatcccaataggaatcaccccaccaggatctccctcgtcttttaccagcataagagcatgaatgagccaaaacatggcttggctctttgggaagccaaaatggctgaaaaagcccgtgagaaagaggaagagtgtgaaaagtatggcccagactatgtgcctcagaaatcccatggcaaaaaagtgaaacgggagcctgctgagccacatgaaacttcagagcccacttacctgcgtttcatcaagtctcttgccgaaaggaccatgtccgtgaccacagactccacagtaactacatctccatatgccttcactcgggtcacagggccttacaacagatatatatgatatcacccccttttgttggttacctcacttgaaaagaccacaaccaacctgtcagtagtatagttctcatgacgtgggcagtggggaaaggtcacagtattcatgacaaatgtggtgggaaaaacctcagctcaccagcaacaaaagaggttatcttaccatagcacttaattttcactggctcccaagtggtcacagatggcatctaggaaaagaccaaagcattctatgcaaaaagaaggtggggaagaaagtgttccgcaatttacatttttaaacactggttctattattggacgagatgatatgtaaatgtgatcccccccccccgcttacaactctacacatctgtgaccacttttaataatatcaagtttgcatagtcatggaacacaaatcaaacaagtactgtagtattacagtgacaggaatcttaaaataccatctggtgctgaatatatgatgtactgaaatactggaattatggctttttgaaatgcagtttttactgtaatcttaacttttatttatcaaaatagctacaggaaacatgaatagcaggaaaacactgaatttgtttggatgttctaagaaatggtgctaagaaaatggtgtctttaatagctaaaaatttaatgcctttatatcatcaagatgctatcagtgtactccagtgcccttgaataataggggtaccttttcattcaagtttttatcataattacctattcttacacaagcttagtttttaaaatgtggacattttaaaggcctctggattttgctcatccagtgaagtccttgtaggacaataaacgtatatatgtacatatatacacaaacatgtatatgtgcacacacatgtatatgtataaatattttaaatggtgttttagaagcactttgtctacctaagctttgacaacttgaacaatgctaaggtactgagatgtttaaaaaacaagtttactttcattttagaatgcaaagttgatttttttaaggaaacaaagaaagcttttaaaatatttttgcttttagccatgcatctgctgatgagcaattgtgtccatttttaacacagccagttaaatccaccatggggcttactggattcaagggaatacgttagtccacaaaacatgttttctggtgctcatctcacatgctatactgtaaaacagttttatacaaaattgtatgacaagttcattgctcaaaaatgtacagttttaagaattttctattaactgcaggtaataattagctgcatgctgcagactcaacaaagctagttcactgaagcctatgctattttatggatcataggctcttcagagaactgaatggcagtctgcctttgtgttgataattatgtacattgtgacgttgtcatttcttagcttaagtgtcctctttaacaagaggattgagcagactgatgcctgcataagatgaataaacagggttagttccatgtgaatctgtcagttaaaaagaaacaaaaacaggcagctggtttgctgtggtggttttaaatcattaatttgtataaagaagtgaaagagttgtatagtaaattaaattgtaaacaaaacttttttaatgcaatgctttagtattttagtactgtaaaaaaattaaatatatacatatatatatatatatatatatatatatatatgagtttgaagcagaattcacatcatgatggtgctactcagcctgctacaaatatatcataatgtgagctaagaattcattaaatgtttgagtgatgttcctacttgtcatatacctcaacactagtttggcaataggatattgaactgagagtgaaagcattgtgtaccatcatttttttccaagtccttttttttattgttaaaaaaaaaagcataccttttttcaatacttgatttcttagcaagtataacttgaacttcaacctttttgttctaaaaattcagggatatttcagctcatgctctccctatgccaacatgtcacctgtgtttatgtaaaattgttgtaggttaataaatatattctttgtcagggatttaacccttttattttgaatcccttctattttacttgtacatgtgctgatgtaactaaaactaattttgtaaatctgttggctctttttattgtaaagaaaagcattttaaaagtttgaggaatcttttgactgtttcaagcaggaaaaaaaaattacatgaaaatagaatgcactgagttgataaagggaaaaattgtaaggcaggagtttggcaagtggctgttggccagagacttacttgtaactctctaaatgaagtttttttgatcctgtaatcactgaaggtacatactccatgtggacttcccttaaacaggcaaacacctacaggtatggtgtgcaacagattgtacaattacattttggcctaaatacatttttgcttactagtatttaaaataaattcttaatcagaggaggcctttgggttttattggtcaaatctttgtaagctggcttttgtctttttaaaaaatttcttgaatttgtggttgtgtccaatttgcaaacatttccaaaaatgtttgctttgcttacaaaccacatgattttaatgttttttgtataccataatatctagccccaaacatttgattactacatgtgcattggtgattttgatcatccattcttaatatttgatttctgtgtcacctactgtcatttgttaaactgctggccaacaagaacaggaagtatagtttggggggttggggagagtttacataaggaagagaagaaattgagtggcatattgtaaatatcagatctataattgtaaatataaaacctgcctcagttagaatgaatggaaagcagatctacaatttgctaatataggaatatcaggttgactatatagccatacttgaaaatgcttctgagtggtgtcaactttacttgaatgaatttttcatcttgattgacgcacagtgatgtacagttcacttctgaagctagtggttaacttgtgtaggaaacttttgcagtttgacactaagataacttctgtgtgcatttttctatgcttttttaaaaactagtttcatttcattttcatgagatgtttggtttataagatctgaggatggttataaatactgtaagtattgtaatgttatgaatgcaggttatttgaaagctgtttattattatatcattcctgataatgctatgtgagtgtttttaataaaatttatatttatttaatgcactctaa

SEQ ID NO: 120 - DNA, 5933 bp, Homo sapiens
  source 1..5933: mol_type = genomic DNA
ggtgaggcagcggcgcggccgggccgggccgggccacaggcggtggcggcgggaccatggaggcggcggtcgctgctccgcgtccccggctgctcctcctcgtgctggcggcggcggcggcggcggcggcggcgctgctcccgggggcgacggcgttacagtgtttctgccacctctgtacaaaagacaattttacttgtgtgacagatgggctctgctttgtctctgtcacagagaccacagacaaagttatacacaacagcatgtgtatagctgaaattgacttaattcctcgagataggccgtttgtatgtgcaccctcttcaaaaactgggtctgtgactacaacatattgctgcaatcaggaccattgcaataaaatagaacttccaactactggccctttttcagtaaagtcatcacctggccttggtcctgtggaactggcagctgtcattgctggaccagtgtgcttcgtctgcatctcactcatgttgatggtctatatctgccacaaccgcactgtcattcaccatcgagtgccaaatgaagaggacccttcattagatcgcccttttatttcagagggtactacgttgaaagacttaatttatgatatgacaacgtcaggttctggctcaggtttaccattgcttgttcagagaacaattgcgagaactattgtgttacaagaaagcattggcaaaggtcgatttggagaagtttggagaggaaagtggcggggagaagaagttgctgttaagatattctcctctagagaagaacgttcgtggttccgtgaggcagagatttatcaaactgtaatgttacgtcatgaaaacatcctgggatttatagcagcagacaataaagacaatggtacttggactcagctctggttggtgtcagattatcatgagcatggatccctttttgattacttaaacagatacacagttactgtggaaggaatgataaaacttgctctgtccacggcgagcggtcttgcccatcttcacatggagattgttggtacccaaggaaagccagccattgctcatagagatttgaaatcaaagaatatcttggtaaagaagaatggaacttgctgtattgcagacttaggactggcagtaagacatgattcagccacagataccattgatattgctccaaaccacagagtgggaacaaaaaggtacatggcccctgaagttctcgatgattccataaatatgaaacattttgaatccttcaaacgtgctgacatctatgcaatgggcttagtattctgggaaattgctcgacgatgttccattggtggaattcatgaagattaccaactgccttattatgatcttgtaccttctgacccatcagttgaagaaatgagaaaagttgtttgtgaacagaagttaaggccaaatatcccaaacagatggcagagctgtgaagccttgagagtaatggctaaaattatgagagaatgttggtatgccaatggagcagctaggcttacagcattgcggattaagaaaacattatcgcaactcagtcaacaggaaggcatcaaaatgtaattctacagctttgcctgaactctccttttttcttcagatctgctcctgggttttaatttgggaggtcaattgttctacctcactgagagggaacagaaggatattgcttccttttgcagcagtgtaataaagtcaattaaaaacttcccaggatttctttggacccaggaaacagccatgtgggtcctttctgtgcactatgaacgcttctttcccaggacagaaaatgtgtagtctacctttattttttattaacaaaacttgttttttaaaaagatgattgctggtcttaactttaggtaactctgctgtgctggagatcatctttaagggcaaaggagttggattgctgaattacaatgaaacatgtcttattactaaagaaagtgatttactcctggttagtacattctcagaggattctgaaccactagagtttccttgattcagactttgaatgtactgttctatagtttttcaggatcttaaaactaacacttataaaactcttatcttgagtctaaaaatgacctcatatagtagtgaggaacataattcatgcaattgtattttgtatactattattgttctttcacttattcagaacattacatgccttcaaaatgggattgtactataccagtaagtgccacttctgtgtctttctaatggaaatgagtagaattgctgaaagtctctatgttaaaacctatagtgtttgaattcaaaaagcttatttatctgggtaacccaaactttttctgttttgtttttggaagggtttttgtggtatgtcatttggtattctattctgaaaatgcctttctcctaccaaaatgtgcttaagccactaaagaaatgaagtggcattaattagtaaattattagcatggtcatgtttgaatattctcacatcaagcttttgcattttaattgtgttgtctaagtatacttttaaaaaatcaagtggcactctagatgcttatagtactttaatatttgtagcatacagactaatttttctaaaagggaaagtctgtctagctgcttgtgaaaagttatgtggtattctgtaagccatttttttctttatctgttcaaagacttattttttaagacatgaattacatttaaaattagaatatggttaatattaaataataggcctttttctaggaaggcgaaggtagttaataatttgaatagataacagatgtgcaagaaagtcacatttgttatgtatgtaggagtaaacgttcggtggatcctctgtctttgtaactgaggttagagctagtgtggttttgaggtctcactacactttgaggaaggcagcttttaattcagtgtttccttatgtgtgcgtacattgcaactgcttacatgtaatttatgtaatgcattcagtgcacccttgttacttgggagaggtggtagctaaagaacattctgagtataggtttttctccatttacagatgtctttggtcaaatattgaaagcaaacttgtcatggtcttcttacattaagttgaaactagcttataataactggtttttacttccaatgctatgaagtctctgcagggcttttacagttttcgaagtccttttatcactgtgatcttattctgaggggagaaaaaactatcatagctctgaggcaagacttcgactttatagtgctatcagttccccgatacagggtcagagtaacccatacagtattttggtcaggaagagaaagtggccatttacactgaatgagttgcattctgataatgtcttatctcttatacgtagaataaatttgaaagactatttgatcttaaaaccaaagtaattttagaatgagtgacatattacataggaatttagtgtcaatttcatgtgtttaaaaacatcatgggaaaaatgcttagaggttactattttgactacaaagttgagtttttttctgtagttaccataatttcattgaagcaaatgaatgagtttgagaggtttgtttttatagttgtgttgtattacttgtttaataataatctctaattctgtgatcaggtactttttttgtgggggttttttttttgtttttttttttttgttgttgtttttgggccatttctaagcctaccagatctgctttatgaaatccaggggaccaatgcattttatcactaaaactatttttatataattttaagaatataccaaaagttgtctgatttaaagttgtaatacatgatttctcactttcatgtaaggttatccacttttgctgaagatattttttattgaatcaaagattgagttacaattatacttttcttacctaagtggataaaatgtacttttgatgaatcagggaatttttttaaagttggagtttagttctaaattgactttacgtattactgcagttaattccttttttggctagggatggtttgataaaccacaattggctgatattgaaaatgaaagaaacttaaaaggtgggatggatcatgattactgtcgataactgcagataaatttgattagagtaataattttgtcatttaaaaacacagttgtttatactgcccatcctaggatgctcaccttccaagattcaacgtggctaaaacatcttctggtaaattgtgcgtccatattcattttgtcagtagccaggagaaatggggatgggggaaatacgacttagtgaggcatagacatccctggtccatcctttctgtctccagctgtttcttggaacctgctctcctgcttgctggtccctgacgcagagaccgttgcctcccccacagccgtttgactgaaggctgctctggagacctagagtaaaacggctgatggaagttgtgggacccacttccatttccttcagtcattagaggtggaagggaggggtctccaagtttggagattgagcagatgaggcttgggatgcccctgctttgacttcagccatggatgaggagtgggatggcagcaaggtggctcctgtggcagtggagttgtgccagaaacagtggccagttgtatcgcctataagacagggtaaggtctgaagagctgagcctgtaattctgctgtaataatgatagtgctcaagaagtgccttgagttggtgtacagtgccatggccatcaagaatcccagatttcaggttttattacaaaatgtaagtggtcacttggcgattttgtagtacatgcatgagttaccttttttctctatgtctgagaactgtcagattaaaacaagatggcaaagagatcgttagagtgcacaacaaaatcactatcccattagacacatcatcaaaagcttatttttattcttgcactggaagaatcgtaagtcaactgtttcttgaccatggcagtgttctggctccaaatggtagtgattccaaataatggttctgttaacactttggcagaaaatgccagctcagatattttgagatactaaggattatctttggacatgtactgcagcttcttgtctctgttttggattactggaatacccatgggccctctcaagagtgctggacttctaggacattaagatgattgtcagtacattaaacttttcaatcccattatgcaatcttgtttgtaaatgtaaacttctaaaaatatggttaataacattcaacctgtttattacaacttaaaaggaacttcagtgaatttgtttttattttttaacaagatttgtgaactgaatatcatgaaccatgttttgatacccctttttcacgttgtgccaacggaatagggtgtttgatatttcttcatatgttaaggagatgcttcaaaatgtcaattgctttaaacttaaattacctctcaagagaccaaggtacatttacctcattgtgtatataatgtttaatatttgtcagagcattctccaggtttgcagttttatttctataaagtatgggtattatgttgctcagttactcaaatggtactgtattgtttatatttgtaccccaaataacatcgtctgtactttctgttttctgtattgtatttgtgcaggattctttaggctttatcagtgtaatctctgccttttaagatatgtacagaaaatgtccatataaatttccattgaagtcgaatgatactgagaagcctgtaaagaggagaaaaaaacataagctgtgtttccccataagtttttttaaattgtatattgtatttgtagtaatattccaaaagaatgtaaataggaaatagaagagtgatgcttatgttaagtcctaacactacagtagaagaatggaagcagtgcaaataaattacatttttcccaagtgccagtg

SEQ ID NO: 121 - DNA, 4605 bp, Homo sapiens
  source 1..4605: mol_type = genomic DNA
actcgcgcgcacggagcgacgacacccccgcgcgtgcacccgctcgggacaggagccggactcctgtgcagcttccctcggccgccgggggcctccccgcgcctcgccggcctccaggccccctcctggctggcgagcgggcgccacatctggcccgcacatctgcgctgccggcccggcgcggggtccggagagggcgcggcgcggaggcgcagccaggggtccgggaaggcgccgtccgctgcgctgggggctcggtctatgacgagcagcggggtctgccatgggtcgggggctgctcaggggcctgtggccgctgcacatcgtcctgtggacgcgtatcgccagcacgatcccaccgcacgttcagaagtcggatgtggaaatggaggcccagaaagatgaaatcatctgccccagctgtaataggactgcccatccactgagacatattaataacgacatgatagtcactgacaacaacggtgcagtcaagtttccacaactgtgtaaattttgtgatgtgagattttccacctgtgacaaccagaaatcctgcatgagcaactgcagcatcacctccatctgtgagaagccacaggaagtctgtgtggctgtatggagaaagaatgacgagaacataacactagagacagtttgccatgaccccaagctcccctaccatgactttattctggaagatgctgcttctccaaagtgcattatgaaggaaaaaaaaaagcctggtgagactttcttcatgtgttcctgtagctctgatgagtgcaatgacaacatcatcttctcagaagaatataacaccagcaatcctgacttgttgctagtcatatttcaagtgacaggcatcagcctcctgccaccactgggagttgccatatctgtcatcatcatcttctactgctaccgcgttaaccggcagcagaagctgagttcaacctgggaaaccggcaagacgcggaagctcatggagttcagcgagcactgtgccatcatcctggaagatgaccgctctgacatcagctccacgtgtgccaacaacatcaaccacaacacagagctgctgcccattgagctggacaccctggtggggaaaggtcgctttgctgaggtctataaggccaagctgaagcagaacacttcagagcagtttgagacagtggcagtcaagatctttccctatgaggagtatgcctcttggaagacagagaaggacatcttctcagacatcaatctgaagcatgagaacatactccagttcctgacggctgaggagcggaagacggagttggggaaacaatactggctgatcaccgccttccacgccaagggcaacctacaggagtacctgacgcggcatgtcatcagctgggaggacctgcgcaagctgggcagctccctcgcccgggggattgctcacctccacagtgatcacactccatgtgggaggcccaagatgcccatcgtgcacagggacctcaagagctccaatatcctcgtgaagaacgacctaacctgctgcctgtgtgactttgggctttccctgcgtctggaccctactctgtctgtggatgacctggctaacagtgggcaggtgggaactgcaagatacatggctccagaagtcctagaatccaggatgaatttggagaatgttgagtccttcaagcagaccgatgtctactccatggctctggtgctctgggaaatgacatctcgctgtaatgcagtgggagaagtaaaagattatgagcctccatttggttccaaggtgcgggagcacccctgtgtcgaaagcatgaaggacaacgtgttgagagatcgagggcgaccagaaattcccagcttctggctcaaccaccagggcatccagatggtgtgtgagacgttgactgagtgctgggaccacgacccagaggcccgtctcacagcccagtgtgtggcagaacgcttcagtgagctggagcatctggacaggctctcggggaggagctgctcggaggagaagattcctgaagacggctccctaaacactaccaaatagctcttctggggcaggctgggccatgtccaaagaggctgcccctctcaccaaagaacagaggcagcaggaagctgcccctgaactgatgcttcctggaaaaccaagggggtcactcccctccctgtaagctgtggggataagcagaaacaacagcagcagggagtgggtgacatagagcattctatgcctttgacattgtcataggataagctgtgttagcacttcctcaggaaatgagattgatttttacaatagccaataacatttgcactttattaatgcctgtatataaatatgaatagctatgttttatatatatatatatatatctatatatgtctatagctctatatatatagccataccttgaaaagagacaaggaaaaacatcaaatattcccaggaaattggttttattggagaactccagaaccaagcagagaaggaagggacccatgacagcattagcatttgacaatcacacatgcagtggttctctgactgtaaaacagtgaactttgcatgaggaaagaggctccatgtctcacagccagctatgaccacattgcacttgcttttgcaaaataatcattccctgcctagcacttctcttctggccatggaactaagtacagtggcactgtttgaggaccagtgttcccggggttcctgtgtgcccttatttctcctggacttttcatttaagctccaagccccaaatctggggggctagtttagaaactctccctcaacctagtttagaaactctaccccatctttaataccttgaatgttttgaaccccactttttaccttcatgggttgcagaaaaatcagaacagatgtccccatccatgcgattgccccaccatctactaatgaaaaattgttctttttttcatctttcccctgcacttatgttactattctctgctcccagccttcatccttttctaaaaaggagcaaattctcactctaggctttatcgtgtttactttttcattacacttgacttgattttctagttttctatacaaacaccaatgggttccatctttctgggctcctgattgctcaagcacagtttggcctgatgaagaggatttcaactacacaatactatcattgtcaggactatgacctcaggcactctaaacatatgttttgtttggtcagcacagcgtttcaaaaagtgaagccactttataaatatttggagattttgcaggaaaatctggatccccaggtaaggatagcagatggttttcagttatctccagtccacgttcacaaaatgtgaaggtgtggagacacttacaaagctgcctcacttctcactgtaaacattagctctttccactgcctacctggaccccagtctaggaattaaatctgcacctaaccaaggtcccttgtaagaaatgtccattcaagcagtcattctctgggtatataatatgattttgactaccttatctggtgttaagatttgaagttggccttttattggactaaaggggaactcctttaagggtctcagttagcccaagtttcttttgcttatatgttaatagttttaccctctgcattggagagaggagtgctttactccaagaagctttcctcatggttaccgttctctccatcatgccagccttctcaacctttgcagaaattactagagaggatttgaatgtgggacacaaaggtcccatttgcagttagaaaatttgtgtccacaaggacaagaacaaagtatgagctttaaaactccataggaaacttgttaatcaacaaagaagtgttaatgctgcaagtaatctcttttttaaaactttttgaagctacttattttcagccaaataggaatattagagagggactggtagtgagaatatcagctctgtttggatggtggaaggtctcattttattgagatttttaagatacatgcaaaggtttggaaatagaacctctaggcaccctcctcagtgtgggtgggctgagagttaaagacagtgtggctgcagtagcatagaggcgcctagaaattccacttgcaccgtagggcatgctgataccatcccaatagctgttgcccattgacctctagtggtgagtttctagaatactggtccattcatgagatattcaagattcaagagtattctcacttctgggttatcagcataaactggaatgtagtgtcagaggatactgtggcttgttttgtttatgtttttttttcttattcaagaaaaaagaccaaggaataacattctgtagttcctaaaaatactgacttttttcactactatacataaagggaaagttttattcttttatggaacacttcagctgtactcatgtattaaaataggaatgtgaatgctatatactctttttatatcaaaagtctcaagcacttatttttattctatgcattgtttgtcttttacataaataaaatgtttattagattgaataaagcaaaatactcaggtgagcatcctgcctcctgttcccattcctagtagctaaa

SEQ ID NO: 122 - DNA, 2967 bp, Homo sapiens
  source 1..2967: mol_type = genomic DNA
cgtcctatctgcagtcggctactttcagtggcagaagaggccacatctgcttcctgtaggccctctgggcagaagcatgcgctggtgtctcctcctgatctgggcccaggggctgaggcaggctcccctcgcctcaggaatgatgacaggcacaatagaaacaacggggaacatttctgcagagaaaggtggctctatcatcttacaatgtcacctctcctccaccacggcacaagtgacccaggtcaactgggagcagcaggaccagcttctggccatttgtaatgctgacttggggtggcacatctccccatccttcaaggatcgagtggccccaggtcccggcctgggcctcaccctccagtcgctgaccgtgaacgatacaggggagtacttctgcatctatcacacctaccctgatgggacgtacactgggagaatcttcctggaggtcctagaaagctcagtggctgagcacggtgccaggttccagattccattgcttggagccatggccgcgacgctggtggtcatctgcacagcagtcatcgtggtggtcgcgttgactagaaagaagaaagccctcagaatccattctgtggaaggtgacctcaggagaaaatcagctggacaggaggaatggagccccagtgctccctcacccccaggaagctgtgtccaggcagaagctgcacctgctgggctctgtggagagcagcggggagaggactgtgccgagctgcatgactacttcaatgtcctgagttacagaagcctgggtaactgcagcttcttcacagagactggttagcaaccagaggcatcttctggaagatacacttttgtctttgctattatagatgaatatataagcagctgtactctccatcagtgctgcgtgtgtgtgtgtgtgtgtatgtgtgtgtgtgttcagttgagtgaataaatgtcatcctcttctccatcttcatttccttggccttttcgttctattccattttgcattatggcaggcctagggtgagtaacgtggatcttgatcataaatgcaaaattaaaaaatatcttgacctggttttaaatctggcagtttgagcagatcctatgtctctgagagacacattcctcataatggccagcattttgggctacaaggttttgtggttgatgatgaggatggcatgactgcagagccatcctcatctcattttttcacgtcattttcagtaactttcactcattcaaaggcaggttataagtaagtcctggtagcagcctctatggggagatttgagagtgactaaatcttggtatctgccctcaagaacttacagttaaatggggagacaatgttgtcatgaaaaggtattatagtaaggagagaaggagacatacacaggccttcaggaagagacgacagtttggggtgaggtagttggcataggcttatctgtgatgaagtggcctgggagcaccaaggggatgttgaggctagtctgggaggagcaggagttttgtctagggaacttgtaggaaattcttggagctgaaagtcccacaaagaaggccctggcaccaagggagtcagcaaacttcagattttattctctgggcaggcatttcaagtttccttttgctgtgacatactcatccattagacagcctgatacaggcctgtagcctcttccggccgtgtgtgctggggaagccccaggaaacgcacatgcccacacagggagccaagtcgtagcatttgggccttgatctaccttttctgcatcaatacactcttgagcctttgaaaaaagaacgtttcccactaaaaagaaaatgtggatttttaaaatagggactcttcctaggggaaaaaggggggctgggagtgatagagggtttaaaaaataaacaccttcaaactaacttcttcgaacccttttattcactccctgacgactttgtgctggggttggggtaactgaaccgcttatttctgtttaattgcattcaggctggatcttagaagacttttatccttccaccatctctctcagaggaatgagcggggaggttggatttactggtgactgattttctttcatgggccaaggaactgaaagagaatgtgaagcaaggttgtgtcttgcgcatggttaaaaataaagcattgtcctgcttcctaagacttagactggggttgacaattgttttagcaacaagacaattcaactatttctcctaggatttttattattattattttttcacttttctaccaaatgggttacataggaagaatgaactgaaatctgtccagagctccaagtcctttggaagaaagattagatgaacgtaaaaatgttgttgtttgctgtggcagtttacagcatttttcttgcaaaattagtgcaaatctgttggaaatagaacacaattcacaaattggaagtgaactaaaatgtaatgacgaaaagggagtagtgttttgatttggaggaggtgtatattcggcagaggttggactgagagttgggtgttatttaacataattatggtaattgggaaacatttataaacactattgggatggtgataaaatacaaaagggcctatagatgttagaaatgggtcaggttactgaaatgggattcaatttgaaaaaaatttttttaaatagaactcactgaactagattctcctctgagaaccagagaagaccatttcatagttggattcctggagacatgcgctatccaccacgtagccactttccacatgtggccatcaaccacttaagatggggttagtttaaatcaagatgtgctgttataattggtataagcataaaatcacactagattctggagatttaatatgaataataagaatactatttcagtagttttggtatattgtgtgtcaaaaatgataatattttggatgtattgggtgaaataaaatattaacatt

SEQ ID NO: 123 - DNA, 1511 bp, Homo sapiens
  source 1..1511: mol_type = genomic DNA
cccgcccaggatggcggaagtggaggcgccgacggcggccgagacggacatgaagcaatatcaaggctccggcggcgtcgccatggatgtggaacggagtcgcttcccctactgcgtggtgtggacgcccatcccggtgctcacgtggtttttccccatcatcggccacatgggcatctgcacatccacaggagtcattcgggacttcgcgggcccctactttgtctcagaggacaacatggcctttggaaagcctgccaagtactggaagttggaccctgctcaggtctatgctagcgggcccaacgcatgggacacggctgtgcacgacgcctctgaggagtacaagcaccgcatgcacaatctctgctgtgacaactgccactcgcacgtggcattggccctgaatctgatgcgctacaacaacagcaccaactggaatatggtgacgctctgcttcttctgcctgctctacgggaagtacgtcagcgttggggccttcgtgaagacctggctgcccttcatccttctcctgggcatcatcctcaccgtcagcctggtctttaacctccggtgatggctgctcggtggccccacacccaccagggtcccgaggaaacagccgccatcccttttggttccagatttttttctcctcaccccaaaaggcagggttgggcctgctgttgtggaccgggggtcggggctggcaggatggaaggactgaggaccagcatgaagtgggggtttgttgtctccctgcctctcagaagcaccctgtcccctcctccccaggcctgtgactccggccctggaagcccctttgttcttctgttgaaaggctttggcttcccgctgtagagctgctcccgccaccacctgctggggtcctgcctcagcccagtgcccagtatggggagaggaggacatttgggctcacctgtcaaggtggccctgggaccagagctggtcccagcatggggtgcaccgggtacacttaacgtgtctctataagccaagttgcttcaggaccttcaccactggcctctagaatggtccagaggggctggctgggtccctttgtcagactcctgccggcagctgccctgggggacatgtgtgcccatctggcatcctccagcccgtgcagtccgctcttcactgttccacggcctcccagtgcctcccagcattggacccatctccccctgcagtttgaggccagagaggtgagtggacctgacaagtgccagagtaaccgtgtagacagagcagtgtagacagcactcagccccagccccaggtgtggacctcatgctggtgatggctcccctgggtggcctgccagcacagccagtgccatcagggagctgaaggggctgtcccccacctaactccagctcccccttcacgttgtcaccaaggccctgtgccgcccgcctcgcccccctgctctgtggattcctttgggaagggctccctgggcaggacaataaagagttttgactcca

SEQ ID NO: 124 - DNA, 4432 bp, Homo sapiens
  source 1..4432: mol_type = genomic DNA
tgccttgaccaggacttgggactttgcgaaaggatcgcggggcccggagaggtgttggagagcacaatggctgaacaagtccttcctcaggctttgtatttgagcaatatgcggaaagctgtgaagatacgggagagaactccagaagacatttttaaacctactaatgggatcattcatcattttaaaaccatgcaccgatacacactggaaatgttcagaacttgccagttttgtcctcagtttcgggagatcatccacaaagccctcatcgacagaaacatccaggccaccctggaaagccagaagaaactcaactggtgtcgagaagtccggaagcttgtggcgctgaaaacgaacggtgacggcaattgcctcatgcatgccacttctcagtacatgtggggcgttcaggacacagacttggtactgaggaaggcgctgttcagcacgctcaaggaaacagacacacgcaactttaaattccgctggcaactggagtctctcaaatctcaggaatttgttgaaacggggctttgctatgatactcggaactggaatgatgaatgggacaatcttatcaaaatggcttccacagacacacccatggcccgaagtggacttcagtacaactcactggaagaaatacacatatttgtcctttgcaacatcctcagaaggccaatcattgtcatttcagacaaaatgctaagaagtttggaatcaggttccaatttcgcccctttgaaagtgggtggaatttacttgcctctccactggcctgcccaggaatgctacagataccccattgttctcggctatgacagccatcattttgtacccttggtgaccctgaaggacagtgggcctgaaatccgagctgttccacttgttaacagagaccggggaagatttgaagacttaaaagttcactttttgacagatcctgaaaatgagatgaaggagaagctcttaaaagagtacttaatggtgatagaaatccccgtccaaggctgggaccatggcacaactcatctcatcaatgccgcaaagttggatgaagctaacttaccaaaagaaatcaatctggtagatgattactttgaacttgttcagcatgagtacaagaaatggcaggaaaacagcgagcaggggaggagagaggggcacgcccagaatcccatggaaccttccgtgccccagctttctctcatggatgtaaaatgtgaaacgcccaactgccccttcttcatgtctgtgaacacccagcctttatgccatgagtgctcagagaggcggcaaaagaatcaaaacaaactcccaaagctgaactccaagccgggccctgaggggctccctggcatggcgctcggggcctctcggggagaagcctatgagcccttggcgtggaaccctgaggagtccactggggggcctcattcggccccaccgacagcacccagcccttttctgttcagtgagaccactgccatgaagtgcaggagccccggctgccccttcacactgaatgtgcagcacaacggattttgtgaacgttgccacaacgcccggcaacttcacgccagccacgccccagaccacacaaggcacttggatcccgggaagtgccaagcctgcctccaggatgttaccaggacatttaatgggatctgcagtacttgcttcaaaaggactacagcagaggcctcctccagcctcagcaccagcctccctccttcctgtcaccagcgttccaagtcagatccctcgcggctcgtccggagcccctccccgcattcttgccacagagctggaaacgacgcccctgctggctgcctgtctcaagctgcacggactcctggggacaggacggggacgagcaagtgcagaaaagccggctgcgtgtattttgggactccagaaaacaagggcttttgcacactgtgtttcatcgagtacagagaaaacaaacattttgctgctgcctcagggaaagtcagtcccacagcgtccaggttccagaacaccattccgtgcctggggagggaatgcggcacccttggaagcaccatgtttgaaggatactgccagaagtgtttcattgaagctcagaatcagagatttcatgaggccaaaaggacagaagagcaactgagatcgagccagcgcagagatgtgcctcgaaccacacaaagcacctcaaggcccaagtgcgcccgggcctcctgcaagaacatcctggcctgccgcagcgaggagctctgcatggagtgtcagcatcccaaccagaggatgggccctggggcccaccggggtgagcctgcccccgaagacccccccaagcagcgttgccgggcccccgcctgtgatcattttggcaatgccaagtgcaacggctactgcaacgaatgctttcagttcaagcagatgtatggctaaccggaaacaggtgggtcacctcctgcaagaagtggggcctcgagctgtcagtcatcatggtgctatcctctgaacccctcagctgccactgcaacagtgggcttaagggtgtctgagcaggagaggaaagataagctcttcgtggtgcccacgatgctcaggtttggtaacccgggagtgttcccaggtggccttagaaagcaaagcttgtaactggcaagggatgatgtcagattcagcccaaggttcctcctctcctaccaagcaggaggccaggaacttctttggacttggaaggtgtgcggggactggccgaggcccctgcaccctgcgcatcaggactgcttcatcgtcttggctgagaaagggaaaagacacacaagtcgcgtgggttggagaagccagagccattccacctcccctcccccagcatctctcagagatgtgaagccagatcctcatggcagcgaggccctctgcaagaagctcaaggaagctcagggaaaatggacgtattcagagagtgtttgtagttcatggtttttccctacctgcccggttcctttcctgaggacccggcagaaatgcagaaccatccatggactgtgattctgaggctgctgagactgaacatgttcacattgacagaaaaacaagctgctctttataatatgcaccttttaaaaaattagaatattttactgggaagacgtgtaactctttgggttattactgtctttacttctaaagaagttagcttgaactgaggagtaaaagtgtgtacatatataatatacccttacattatgtatgagggatttttttaaattatattgaaatgctgccctagaagtacaataggaaggctaaataataataacctgttttctggttgttgttggggcatgagcttgtgtatacactgcttgcataaactcaaccagctgcctttttaaagggagctctagtcctttttgtgtaattcactttatttattttattacaaacttcaagattatttaagtgaagatatttcttcagctctggggaaaatgccacagtgttctcctgagagaacatccttgctttgagtcaggctgtgggcaagttcctgaccacagggagtaaattggcctctttgatacacttttgcttgcctccccaggaaagaaggaattgcatccaaggtatacatacatattcatcgatgtttcgtgcttctccttatgaaactccagctatgtaataaaaaactatactctgtgttctgttaatgcctctgagtgtcctacctccttggagatgagatagggaaggagcagggatgagactggcaatggtcacagggaaagatgtggccttttgtgatggttttattttctgttaacactgtgtcctgggggggctgggaagtcccctgcatcccatggtaccctggtattgggacagcaaaagccagtaaccatgagtatgaggaaatctctttctgttgctggcttacagtttctctgtgtgctttgtggttgctgtcatatttgctctagaagaaaaaaaaaaaaggaggggaaatgcattttccccagagataaaggctgccattttgggggtctgtacttatggcctgaaaatatttgtgatccataactctacacagcctttactcatactattaggcacactttccccttagagccccctaagtttttcccagacgaatctttataatttctttccaaagataccaaataaacttcagtgttttcatctaattctcttaaagttgatatcttaatattttgtgttgatcattatttccattcttaatgtgaaaaaaagtaattatttatacttattataaaaagtatttgaaatttgcacatttaattgtccctaatagaaagccacctattctttgttggatttcttcaagtttttctaaataaatgtaacttttcacaagagtcaacattaaaaaataaattatttaagaaca

SEQ ID NO: 125 - DNA, 1990 bp, Homo sapiens
  source 1..1990: mol_type = genomic DNA
gctcgtccgagtacatgtgagcggtaatcgcccctgcagctggttatcctgacattatgcactccgaagcagaagaatccaaggaaggcctaggcttaaacactggcatatatggagagaacagttgccactcgactcagagattgagtagacacccaaagaactgcagttcttaagccttaggagaagcgagagaaatgggccagtggccacagatgtctttaattccaaaaacctggccgttcaggcacaaaagaagatcttgggtaaaatggtgtccaaatccatcgccaccaccttaatagacgacacaagtagtgaggtgctggatgagctctacagagtgaccagggagtacacccaaaacaagaaggaggcagagaagatcatcaagaacctcatcaagacagtcatcaagctggccattctttataggaataatcagtttaatcaagatgagctagcattgatggagaaatttaagaagaaagttcatcagcttgctatgaccgtggtcagtttccatcaggtggattatacctttgaccggaatgtgttatccaggctgttaaatgaatgcagagagatgctgcaccaaatcattcagcgccacctcactgccaagtcacatggacgggttaataatgtgtttgatcatttttcagattgtgaatttttggctgccttgtataatccttttgggaattttaaaccccacttacaaaaactatgtgatggtatcaacaaaatgttggatgaagagaacatatgagcacatgagttaagattgtgactgatcatgatttatttgaagatggagcactgctgatttatgaaggaaaaaagaagaattttctaaagattacacatatttcagaaagactttacccaattcagttgtcagacataatgatttatttgaaggcttgttttatttgaagaaaagcatattgccaaaaattctggttaaaagcttcctaacgggtaacagaccatgggagagatatgtggttgggtaatgcaaatgtagttatacaaagaaaaatacagatgtctccagacctgaggactttttaatagggcagttgttgtgttggtggcacattggatatttctaacatgtacaaagctatgtattttgatttactttcatttcttgctatgtatatgtacttttcttaaaatgccaagaactttctcttgctatcattgctccttttgaaacaattcaattttcatgtctacagctgactgttttgttaagattgagtcatcgacattcaggatttaagtctgaggtagtcaaccctcaggaaaaaaaaaatggcttatctgaaatcagtactgtggaaatgaactatattagctattatgaataatgtccagtataagaatatgcttctggaattgagttctccttttaagtaccaatgatacttaaatttctcagaaatgtaatggtgtgtcattgccttgaaatgcttgcttagggcttcttttatgttatcttaaaaagtgctggtgaattttccattttttacatccatttcacatgtaagagacaaaaaagtctagattggtcttgatattgagataataaaaagtaagtagcattaagaaaggtaacaatcttcattctacagatgaactcattgaaacaatttaggggaatgaggggcaaaaggggagaaatactgctaaagaacatgagcataaaaatgcgtgcgtttcagtgtttaagaaggcttgataaagaatgtcacttttttatttaactgataagatttttgttattttttactttgataagtaaaccaaagaatatttgtatttcaagcagtttgtgtggtgtttctatataattttctgtgtataaataataaagtaggcatttgtttattttgtaaaaaagaaatgaaaatctgctggccagctatgtcctctaggaaatgacagacccaaccaccagcaataaacatttccattgtca

SEQ ID NO: 126 - DNA, 1179 bp, Homo sapiens
  source 1..1179: mol_type = genomic DNA
cacgcacttcacctgggtcgggattctcaggtcatgaacggtcccagccacctccgggcagggcgggtgaggacggggacggggcgtgtccaactggctgtgggctcttgaaacccgagcatggcacagcacggggcgatgggcgcgtttcgggccctgtgcggcctggcgctgctgtgcgcgctcagcctgggtcagcgccccaccgggggtcccgggtgcggccctgggcgcctcctgcttgggacgggaacggacgcgcgctgctgccgggttcacacgacgcgctgctgccgcgattacccgggcgaggagtgctgttccgagtgggactgcatgtgtgtccagcctgaattccactgcggagacccttgctgcacgacctgccggcaccacccttgtcccccaggccagggggtacagtcccaggggaaattcagttttggcttccagtgtatcgactgtgcctcggggaccttctccgggggccacgaaggccactgcaaaccttggacagactgcacccagttcgggtttctcactgtgttccctgggaacaagacccacaacgctgtgtgcgtcccagggtccccgccggcagagccgcttgggtggctgaccgtcgtcctcctggccgtggccgcctgcgtcctcctcctgacctcggcccagcttggactgcacatctggcagctgaggagtcagtgcatgtggccccgagagacccagctgctgctggaggtgccgccgtcgaccgaagacgccagaagctgccagttccccgaggaagagcggggcgagcgatcggcagaggagaaggggcggctgggagacctgtgggtgtgagcctggccgtcctccggggccaccgaccgcagccagcccctccccaggagctccccaggccgcaggggctctgcgttctgctctgggccgggccctgctcccctggcagcagaagtgggtgcaggaaggtggcagtgaccagcgccctggaccatgcagttcggcggccgcggctgggccctgcaggagggagagagagacacagtcatggcccccttcctcccttgctggccctgatggggtggggtcttaggacgggaggctgtgtccgtgggtgtgcagtgcccagcacgggacccggctgcaggggaccttcaataaacacttgtccag

SEQ ID NO: 127 - DNA, 5970 bp, Homo sapiens
  source 1..5970: mol_type = genomic DNA
caaggagggatcccacagatgtcacagggctgtcacagagctgtggtgggaatttcccatgagaccccgcccctggctgagtcaccgcactcctgtgtttgacctgaagtcctctcgagctgcagaagcctgaagaccaaggagtggaaagttctccggcagccctgagatctcaagagtgacatttgtgagaccagctaatttgattaaaattctcttggaatcagctttgctagtatcatacctgtgccagatttcatcatgggaaacagctgttacaacatagtagccactctgttgctggtcctcaactttgagaggacaagatcattgcaggatccttgtagtaactgcccagctggtacattctgtgataataacaggaatcagatttgcagtccctgtcctccaaatagtttctccagcgcaggtggacaaaggacctgtgacatatgcaggcagtgtaaaggtgttttcaggaccaggaaggagtgttcctccaccagcaatgcagagtgtgactgcactccagggtttcactgcctgggggcaggatgcagcatgtgtgaacaggattgtaaacaaggtcaagaactgacaaaaaaaggttgtaaagactgttgctttgggacatttaacgatcagaaacgtggcatctgtcgaccctggacaaactgttctttggatggaaagtctgtgcttgtgaatgggacgaaggagagggacgtggtctgtggaccatctccagccgacctctctccgggagcatcctctgtgaccccgcctgcccctgcgagagagccaggacactctccgcagatcatctccttctttcttgcgctgacgtcgactgcgttgctcttcctgctgttcttcctcacgctccgtttctctgttgttaaacggggcagaaagaaactcctgtatatattcaaacaaccatttatgagaccagtacaaactactcaagaggaagatggctgtagctgccgatttccagaagaagaagaaggaggatgtgaactgtgaaatggaagtcaatagggctgttgggactttcttgaaaagaagcaaggaaatatgagtcatccgctatcacagctttcaaaagcaagaacaccatcctacataatacccaggattcccccaacacacgttcttttctaaatgccaatgagttggcctttaaaaatgcaccactttttttttttttttgacagggtctcactctgtcacccaggctggagtgcagtggcaccaccatggctctctgcagccttgacctctgggagctcaagtgatcctcctgcctcagtctcctgagtagctggaactacaaggaagggccaccacacctgactaacttttttgttttttgtttggtaaagatggcatttcaccatgttgtacaggctggtctcaaactcctaggttcactttggcctcccaaagtgctgggattacagacatgaactgccaggcccggccaaaataatgcaccacttttaacagaacagacagatgaggacagagctggtgataaaaaaaaaaaaaaaaaagcattttctagataccacttaacaggtttgagctagtttttttgaaatccaaagaaaattatagtttaaattcaattacatagtccagtggtccaactataattataatcaaaatcaatgcaggtttgttttttggtgctaatatgacatatgacaataagccacgaggtgcagtaagtacccgactaaagtttccgtgggttctgtcatgtaacacgacatgctccaccgtcaggggggagtatgagcagagtgcctgagtttagggtcaaggacaaaaaacctcaggcctggaggaagttttggaaagagttcaagtgtctgtatatcctatggtcttctccatcctcacaccttctgcctttgtcctgctcccttttaagccaggttacattctaaaaattcttaacttttaacataatattttataccaaagccaataaatgaactgcatatgataggtatgaagtacagtgagaaaattaacacctgtgagctcattgtcctaccacagcactagagtgggggccgccaaactcccatggccaaacctggtgcaccatttgcctttgtttgtctgttggtttgcttgagacagtcttgctctgttgcccaggctggaatggagtggctattcacaggcacaatcatagcacactttagccttaaactcctgggctcaagtgatccacccgcctcagtctcccaagtagctgggattacaggtgcaaacctggcatgcctgccattgtttggcttatgatctaaggatagctttttaaattttattcattttatttttttttgagacagtgtctcactctgtctcccaggctggagtacagtggtacaatcttggatcaccgcctcccagtttcaagtgatctccctgcctcagcctcctaagtagctgggactacaggtatgtgccaccacgcctggctaatttttatatttttagtagagacggggtttcaccatgttgtccaggctggtctcaaactcctgacctcaggtgatctgcccacctctgcctcccaaagtgctgggattacaggcatgagccaccatgcctggccatttcttacacttttgtatgacatgcctattgcaagcttgcgtgcctctgtcccatgttattttactctgggatttaggtggagggagcagcttctatttggaacattggccatcgcatggcaaatgggtatctgtcacttctgctcctatttagttggttctactataacctttagagcaaatcctgcagccaagccaggcatcaatagggcagaaaagtatattctgtaaataggggtgaggagaagatatttctgaacaatagtctactgcagtaccaaattgcttttcaaagtggctgttctaatgtactcccgtcagtcatataagtgtcatgtaagtatcccattgatccacatccttgctaccctctggtactatcaggtgcccttaattttgccaagccagtgggtatagaatgagatctcactgtggtcttagtttgcatttgcttggttactgatgagcaccttgtcaaatatttatataccatttgtgtttatttttttaaataaaatgcttgctcatgcttttttgcccatttgcaaaaaaacttggggccgggtgcagtggctcatgcctgtagtcccagctctttgggaggccaaggtgggcagatcgcttgagcccaggagttcgagaccagccttggcaacatggcgaaaccctgtctttacaaaaaatacaaaaattagccgggtgtggtggtgtgcacctgaagtcccagctactcagtaggttcgctttgagcctgggaggcagaggttgcagtgagctgggaccgcatcactacacttcagcctgggcaacagagaaaaaccttttctcagaaacaaacaaacccaaatgtggttgtttgtcctgattcctaaaaggtctttatgtattctagataataatctttggtcagttatatgtgttaaaaaatatcttctttgtggccaggcacggtagctcacacctgtaatcccagcactttgcggggctgaggtgggtggatcatctgaggtcaagagttcaagatcagcctggccaacacagtgaaaccccatctctactaaacatgtacaaaacttagctgggtatggtggcgggtgcctgtaaccccagctgctccagaggctgtggcagaagaatcgcttgaacccaggaggcagaggttgcagcgagccaagattgtgccattgcactccagactgggtgacaagagtgaaattctgcctatctatctatctatctatctatatctatatatatatatatatatatcctttgtaatttatttttccctttttaaaattttttataaaattcttttttatttttatttttagcagaggtgaggtttctgaggtttcattatgttgcccaggctggtcttgaactcctgagctcaagtgatcctcccacctcagccttccaaagtgctggaattgcagacatgagccaccgcgcccctcctgtttttctctaattaatggtgtctttctttgtctttctggtaataagcaaaaagttcttcatttgatttggttaaatttataactgttttctcatatggttaacattttttcttgcctggctaaagaaatccttttctgcccaatactataaagaggtttgcccacattttattccaaaagttttaagttttgtctttcatcttgaagtctaatgtatcaggaactggcttttgtgcctgttgggaggtagtgatccaattccatgtcttgcatgtaggtaaccactggtccctgcgccatgtattcaatacgtcgtctttctcctgcgggtctgcaatctcacctaccatccatcaagtttccatagggccatgggtctgcttctgggctccctgttctgttccattgtcaatttgtctatcctgtgccagtatcacactgtgtttattacaatagctttgtaacagctctcgatatccggtaggacatctccctccaccttctttttctacttcagaagtgtcttagctaggtcaggcacggtggctcacgcctgtaatcccagcactttgggaggccgacgcggatggatcacctgaggtcaggagttttgagacagcctggccaacatggtgaaaccccatctctactaaaaaatacaaaaattagtcaggcatggtggcatgtgcctgtaatcccagctatttgggaggctgaggccggagaattgcttgaacccggggggcggaggttgcagtgagccgagatcgtaccattgcactccagcctgggtgacagagcgaaactctgtctcaggaaaaaaaagaaaagagatgtcttggttattcttggttctttattattcaatataaattttagaagctgaatttgaaaagatttggattggaatttcattaaatctacaggtcaatttagggagagttgataattttacagaattgagtcatctggtgttccaataagaataagagaacaattattggctgtacaattcttgccaaatagtaggcaaagcaaagcttaggaagtatactggtgccatttcaggaacaaagctaggtgcgaatatttttgtctttctgaatcatgatgctgtaagttctaaagtgatttctcctcttggctttggacacatggtgtttaattacctactgctgactatccacaaacagaaagagactggtcatgccccacagggttggggtatccaagataatggagcgaggctctcatgtgtcctaggttacacaccgaaaatccacagtttattctgtgaagaaaggaggctatgtttatgatacagactgtgatatttttatcatagcctattctggtatcatgtgcaaaagctataaatgaaaaacacaggaacttggcatgtgagtcattgctccccctaaatgacaattaataaggaaggaacattgagacagaataaaatgatccccttctgggtttaatttagaaagttccataattaggtttaatagaaataaatgtaaatttctatgattaaaaataaattagcacatttagggatacacaaattataaatcattttctaaatgctaaaaacaagctcaggtttttttcagaagaaagttttaattttttttctttagtggaagatatcactctgacggaaagttttgatgtgaggggcggatgactataaagtgggcatcttcccccacaggaagatgtttccatctgtgggtgagaggtgcccaccgcagctagggcaggttacatgtgccctgtgtgtggtaggacttggagagtgatctttatcaacgtttttatttaaaagactatctaataaaacacaaaactatgatgttcacagg

SEQ ID NO: 128 - DNA, 2680 bp, Homo sapiens
  source 1..2680: mol_type = genomic DNA
cgggtgccctgcccccgtccaggagccctaggagtgctacggggggccggagccttgcccgggccgctgccccgtccctggattcggggctggacgcagcaagcggggcgctgtgtccccaagctccccgtcctcgggggagcttttggaagagtcccagatggaagcgaccaggctccggcagaaggcagaggagctagtgaaggacaacgagctgctcccaccaccttctccctccttgggctccttcgaccccctggctgagctcacaggaaaggactcaaatgtcacagcatctcccacagcccctgcatgccccagtgacaagccagcaccagtccagaagcctccatccagtggcacctcctctgaatttgaagtggtcactcctgaggagcagaattcaccagagagcagcagccatgccaatgcgatggcgctgggccccctgccccgtgaggacggcaacctgatgctgcacctgcagcgcctggagaccacgctgagtgtgtgtgccgaggagccggaccacggccagctcttcacccacctgggccgcatggccctggagttcaaccgactggcatccaaggtgcacaagaatgagcagcgcacctccattctgcagaccctgtgtgagcagcttcggaaggagaacgaggctctgaaggccaagttggataagggcctggaacagcgggatcaggctgccgagaggctgcgggaggaaaatttggagctcaagaagttgttgatgagcaatggcaacaaagagggtgcgtctgggcggccaggctcaccgaagatggaagggacaggcaagaaggcagtggctggacagcagcaggctagtgtgacggcaggtaaggtcccagaggtggtggccttgggcgcagccgagaagaaggtgaagatgctggagcagcagcgcagtgagctgctggaagtgaacaagcagtgggaccagcatttccggtccatgaagcagcagtatgagcagaagatcactgagctgcgtcagaagctggctgatttgcagaagcaggtgactgacctggaggccgagcgggagcagaagcagcgtgactttgaccgcaagctcctcctggccaagtccaagattgaaatggaggagaccgacaaggagcagctgacagcagaggccaaggagctgcgccaaaaggtcaagtacctgcaggatcagctgagcccactcacccgacagcgtgagtaccaggaaaaggagatccagcggctcaacaaggccctggaggaagcactgagcatccaaaccccgccatcatctccaccaacagcatttgggagcccagaaggagcaggggccctcctaaggaaacaggagctggtcacgcagaatgagttgctgaaacagcaggtgaagatcttcgaggaggacttccagagggagcgcagtgatcgtgagcgcatgaatgaggagaaggaagagctgaagaagcaagtggagaagctgcaggcccaggtcaccctgtcaaatgcccagctaaaagcattcaaagatgaggagaaggcaagagaagccctcagacagcagaagaggaaagcaaaggcctcaggagagcgttaccatgtggagccccacccagaacatctctgcggggcctacccctacgcctacccgcccatgccagccatggtgccacaccatggcttcgaggactggtcccagatccgctacccccctccccccatggccatggagcacccgcccccactccccaactcgcgcctcttccatctgccggaatacacctggcgtctaccctgtggaggggttcgaaatccaaatcagagctcccaagtgatggaccctcccacagccaggcctacagaaccagagtctccaaaaaatgaccgtgaggggcctcagtgagaccagattgtgtcatttggctccaccttcatcttgcagagccagctgatctcagattgccaagaaactagaagccacttgcacggtgtggccagagcctcagctggatgagaggctgagatgggtggccagcttgtacaccagtccctgaactgagctgtttacaggactggggaggctccacccagaaggctttcatttgtactctgctgggagtgactgggaaaaactccttccctgctgctgagtggagagaggcctcatccggctttgacccaccatccgttgcagaagcctccaggagcagcaatcctaagagtgggaggcagccaagacccccttccttcaaaacctcccggaagtggtttcaggccctctagttgccatgaccaatttgtgtgtgtgtttaatttttgcttcaagctctgtagcaggacctgccccacgcacacccctacccctctgtgaggagctgtgggaagtgtgggtttgtctccagaacagaagagaatgatggatattctggctctggggccctctccaccaccactcacagtagccttgctgaagccatcacagatgggagaaggccatgccagccacgtccgccgaggggcgccagcctgaagctgccaggccctgaggttcagaccctggaccccatagctggaggcctgtggtgccagaagcccagattagggtggctgtccatccctggatagctatttgcacgaatcatggacataaatccaagttgaagaagatcaa

SEQ ID NO: 129 - DNA, 4131 bp, Homo sapiens
  source 1..4131: mol_type = genomic DNA
ggtgcgcgccgcggcttgggggagagttgagcgcttttcccccctcttttttttttttttcctcttcttcttaaacaaaccacaaacggatgtgagggaaggaaggtgtttcttttactcctgagcccagacacctcactctgttccgtctaagcttgttttgctgaacacttttttttaaaaaaggaaaaagaaaaggagttgcttgatgtgagagtgaaatggacgtaagattttatccacctccagcccagcccgccgctgcgcccgacgctccctgtctgggaccttctccctgcctggacccctactattgcaacaagtttgacggtgagaacatgtatatgagcatgacagagccgagccaggactatgtgccagccagccagtcctaccctggtccaagcctggaaagtgaagacttcaacattccaccaattactcctccttccctcccagaccactcgctggtgcacctgaatgaagttgagtctggttaccattctctgtgtcaccccatgaaccataatggcctgctaccatttcatccacaaaacatggacctccctgaaatcacagtctccaatatgctgggccaggatggaacactgctttctaattccatttctgtgatgccagatatacgaaacccagaaggaactcagtacagttcccatcctcagatggcagccatgagaccaaggggccagcctgcagacatcaggcagcagccaggaatgatgccacatggccagctgactaccattaaccagtcacagctaagtgctcaacttggtttgaatatgggaggaagcaatgttccccacaactcaccatctccacctggaagcaagtctgcaactccttcaccatccagttcagtgcatgaagatgaaggcgatgatacctctaagatcaatggtggagagaagcggcctgcctctgatatggggaaaaaaccaaaaactcccaaaaagaagaagaagaaggatcccaatgagccccagaagcctgtgtctgcctatgcgttattctttcgtgatactcaggccgccatcaagggccaaaatccaaacgctacctttggcgaagtctctaaaattgtggcttcaatgtgggacggtttaggagaagagcaaaaacaggtctataaaaagaaaaccgaggctgcgaagaaggagtacctgaagcaactcgcagcatacagagccagccttgtatccaagagctacagtgaacctgttgacgtgaagacatctcaacctcctcagctgatcaattcgaagccgtcggtgttccatgggcccagccaggcccactcggccctgtacctaagttcccactatcaccaacaaccgggaatgaatcctcacctaactgccatgcatcctagtctccccaggaacatagcccccaagccgaataaccaaatgccagtgactgtctctatagcaaacatggctgtgtcccctcctcctcccctccagatcagcccgcctcttcaccagcatctcaacatgcagcagcaccagccgctcaccatgcagcagccccttgggaaccagctccccatgcaggtccagtctgccttacactcacccaccatgcagcaaggatttactcttcaacccgactatcagactattatcaatcctacatctacagctgcacaagttgtcacccaggcaatggagtatgtgcgttcggggtgcagaaatcctcccccacaaccggtggactggaataacgactactgcagtagtgggggcatgcagagggacaaagcactgtaccttacttgagaatctgaacacctcttctttccactgaggaattcagggaagtgttttcaccatggattgctttgtacagtcaaggcagttctccattttattagaaaatacaagttgctaagcacttaggaccatttgagcttgtgggtcacccactctggaagaaatagtcatgcttctttattatttttttaatcctttatggacattgtttttcttcttccctgaaggaaatttggaccattcagattttatgttggttttttgctgtgaagtgctgcgctctagtaactgccttagcaactgtagatgtctcggataaaagtcctggattttccattggttttcataatgggtgtttatatgaaactactaaagactttttaaatggcttgatgtagcagtcatagcaagtttgtaaatagcatctatgttacactctcctagagtataaaatgtgaatgtttttgtagctaaattgtaattgaaactggctcattccagtttattgatttcacaataggggttaaattggcaaacattcatatttttacttcatttttaaaacaactgactgatagttctatattttcaaaatatttgaaaataaaaagtattcccaagtgattttaatttaaaaacaaattggctttgtctcattgatcagacaaaaagaaactagtattaagggaagcgcaaacacatttattttgtactgcagaaaaattgcttttttgtatcactttttgtgtaatggttagtaaatgtcatttaagtccttttatgtataaaactgccaaatgcttacctggtattttattagatgcagaaacagattggaaacagctaaattacaacttttacatatggctctgtcttattgtttcttcatactgtgtctgtatttaatctttttttatggaacctgttgcgcctatttatgaaataataaatataggtgtttgtaagtaaatttgttagtatttgaaagaggtttctttgatgttttaacttttgctggcaaaaaaaaattcacgcttggtgtgaatactttattatttagtttttacagtaacatgaataaagccaaacctgcttttcatttagcagcaaattaaagtaaccagtccttatttctgcatttctttggttgatgcaaacaaaaaactattatatttaagaactttatttcttcatacgacataacagaattgccctccaagtcacacaagctccaagactaaacaaacagacaggtcctctgtcttaaaaaggttacttcttggttctcagctggttctagtcaattctgaaccaccaccccccgccccccgcaaaaaagtaaaagtcaaaccaaacttcctcaagctgcatgcttttcacaaaatccagaaagcatttaagaattgaactaggggctggaagaagtgaaagggaagcatctaaaaatgaaaggtgagtaaccagatagcaaaagaaaagggaaagccatccaaatttgaaagctgttgatagaaattgagattcttgctgtcttttgtgcctctacaagctactactcattccagaattcctgggtcttccaagaggattcttaaggtaccagagatttgctagggaaccaaaagtgcttgagaatctgcctgagggcttgcatagctttcacattaaaaaaagaaaaagctagcagatttactcctttttaggggatcatatcaagaaagttagtctggttggaaaccaagagaatggctgatgtctctttcttggaatatgtgaaataaatttagcagtttaactaaatacaaatatatgcattgtgtaatccactcagaattaaacagacaaaaggtatgcttgctttggaatgattttaggcattgtacaaccttgaatcacttgagcatgtaataactaataaataatgcagatccatgtgattattaaaatgactgtagctgagagctctaattttcctgtcttgaaactgtataagaactcatgtgattaagttcacagtttattgtttgtctgtttagtattttagaaatataccagcactactaattaactaatgtcttttatttattatattatgataaagtaaaaatttcacttgcattaagtctaaactgagaaggtaattactgggaggagaatgagcagctttgactttgacaggcggtttgtgcaggaaagcacagtgccgtgttgtttacagcttttctagagcagctgtgcgaccagggtagagagtgttgaaattcaataccaaatacagtaaaaacaaatgtaaataaaagaaaacacatcatcaataaaactgttattatgcgtg

SEQ ID NO: 130 - DNA, 2504 bp, Homo sapiens
  source 1..2504: mol_type = genomic DNA
ggcgagcttcttggcctaagggcaggaagagatggcagcgggggagacgcagctctacgccaaggtctccaacaagctcaagagccgcagcagcccctcgctcctggagcccctcctggccatgggcttcccggtgcacaccgcgctgaaagcgttggcagccacggggaggaagacggcggaggaggccttggcctggctgcatgatcattgcaatgacccttccctagacgaccccatcccccaggagtatgcccttttcctctgtccaacggggcccctgctggaaaaacttcaagagttctggagagagagcaagcgccagtgtgcaaagaacagagctcatgaggtcttcccacacgtgacactctgtgacttcttcacgtgtgaagaccagaaggtggaatgcctgtacgaggcgctgaagagagctggagacaggctcctgggctccttccccacggccgtgcctctggctctccactcctccatcagctacctcggcttcttcgtcagtggcagccccgcagacgtcatccgggaattcgccatgaccttcgccacggaagcatctctcttagcaggcacttccgtttcccgcttctggattttcagccaggtgcctggacatggccctaacctgaggctgagcaatttaactagagcctccttcgtgagccactacatccttcaaaaatactgctccgtgaagccttgcaccaaacagctgcatctgaccttggcccacaagttctacccccaccaccagaggacgctggagcagctggccagagccatccccctgggccacagctgccagtggaccgcagcactctactcccgagacatgcgctttgtgcactaccagaccctgagagccctattccagtacaaaccccagaacgtggatgagctgacgctaagtcctggtgactacatctttgtggaccccacgcagcaggacgaagccagcgagggctgggtgattgggatctcacagcggacgggctgccggggcttcctgccggaaaactacacggatcgagccagtgagtctgacacgtgggtgaagcacaggatgtacaccttcagtctagccacagacctgaactccagaaaggatggtgaagccagcagcagatgcagcggggaatttcttccacaaacggcaaggagtcttagcagcttacaggccttgcaggctaccgttgcaaggaagagcgtgctggtggttcgccacggggagagagtggatcagatcttcgggaaggcatggctgcagcaatgctccactcctgatgggaaatactacaggccagacctgaatttcccctgcagtctgccaagacggagtcgtgggatcaaagactttgaaaacgatcccccattatcatcgtgtggcattttccagtccagaattgcaggggacgcgctactggacagtggtatcagaatcagctctgtgtttgcctccccagccctccgctgtgtgcagacggccaaactcatcctggaagaactcaaactggagaaaaaaatcaagatacgagtggaacctggaatctttgaatggacaaaatgggaagctggcaaaaccaccccaaccctcatgagcctggaagagctgaaagaggcaaatttcaacattgacactgattacaggcccgcgtttcccctgtccgccctcatgccggccgagagctaccaggagtacatggacaggtgcacggcgagcatggtgcaaatcgtcaacacctgtccacaggacacgggtgtcatcctaattgtgagtcacggctccactctggactcctgcacgcggccactgctcgggctgccgccccgggaatgtggggattttgcccaactcgtgagaaagatcccttccctgggcatgtgcttctgtgaagaaaataaagaggaaggaaaatgggagttggtgaacccaccggtgaagaccctgacccacggggcgaacgcagcatttaactggaggaactggatctcaggcaactgagagccacggtgatgttgtcataacctcagagtggagaggcagaaaccatgtgcagaggctgggagatgctgctgtttccagaggcgtcttagtctcacccaatgtgatttgtagaagcacgagacgcacttttatatcccggaatatttccctccggctttcgcctttgtaactcccatctgtggacccatcgtccaccagcccagctgcggggagcacagggcaggtggctgggtgaggatgccgccctgcagcatgtacaccgagtgtctgcagctggggacacaactgcccgggactctaacttccaggaattaaagactcaccacacacgaaggatctaaccacttcattttccatggtctaatcattaaattcccaatcgttttttctttttctgggtccatcactctttagccatatccacatgggctaaaacaggtgtaatagtcaataaaatggtcccagaaaaccatcgaccaggtca

SEQ ID NO: 131 - DNA, 2627 bp, Homo sapiens
  source 1..2627: mol_type = genomic DNA
atgattgcatcgctgcactccagcctggacaacagattcctgtgccttaagaacattagaaccttcctgtccacctgctgtgagaagttcggcctcaagcggagcgagctcttcgaagcctttgacctcttcgatgtgcaggattttggcaaggtcatctacaccctgtctgctctgtcctggaccccgatcgcccagaacagggggatcatgcccttccccaccgaggaggagagtgtaggtgatgaagacatctacagtggcctgtccgaccagatcgacgacacggtggaggaggatgaggacctgtatgactgcgtggagaatgaggaggcggaaggcgacgagatctatgaggacctcatgcgctcggagcccgtgtccatgccgcccaagatgacagagtatgacaagcgctgctgctgcctgcgggagatccagcagacggaggagaagtacactgacacgctgggctccatccagcagcatttcttgaagcccctgcaacggttcctgaaacctcaagacattgagatcatctttatcaacattgaggacctgcttcgtgttcatactcacttcctaaaggagatgaaggaagccctgggcacccctggcgcagccaatctctaccaggtcttcatcaaatacaaggagaggttcctcgtctatggccgctactgcagccaggtggagtcagccagcaaacacctggaccgtgtggccgcagcccgggaggacgtgcagatgaagctggaggaatgttctcagagagccaacaacgggaggttcaccctgcgggacctgctgatggtgcctatgcagcgagttctcaaatatcacctccttctccaggagctggtgaaacacacgcaggaggcgatggagaaggagaacctgcggctggccctggatgccatgagggacctggctcagtgcgtgaacgaggtcaagcgagacaacgagacactgcgacagatcaccaatttccagctgtccattgagaacctggaccagtctctggctcactatggccggcccaagatcgacggggaactcaagatcacctcggtggaacggcgctccaagatggacaggtatgccttcctgctcgacaaagctctactcatctgtaagcgcaggggagactcctatgacctcaaggactttgtaaacctgcacagcttccaggttcgggatgactcttcaggagaccgagacaacaagaagtggagccacatgttcctcctgatcgaggaccaaggtgcccagggctatgagctgttcttcaagacaagagaattgaagaagaagtggatggagcagtttgagatggccatctccaacatctatccggagaatgccaccgccaacgggcatgacttccagatgttctcctttgaggagaccacatcctgcaaggcctgtcagatgctgcttagaggtaccttctatcagggctaccgctgccatcggtgccgggcatctgcacacaaggagtgtctggggagggtccctccatgtggccgacatgggcaagatttcccaggaactatgaagaaggacaaactacatcgcagggctcaggacaaaaagaggaatgagctgggtctgcccaagatggaggtgtttcaggaatactacgggcttcctccaccccctggagccattggaccctttctacggctcaaccctggagacattgtggagctcacgaaggctgaggctgaacagaactggtgggagggcagaaatacatctactaatgaaattggctggtttccttgtaacagggtgaagccctatgtccatggccctcctcaggacctgtctgttcatctctggtacgcaggccccatggagcgggcaggggcagagagcatcctggccaaccgctcggacgggactttcttggtgcggcagagggtgaaggatgcagcagaatttgccatcagcattaaatataacgtcgaggtcaagcacattaaaatcatgacagcagaaggactgtaccggatcacagagaaaaaggctttccgggggcttacggagctggtggagttttaccagcagaactctctaaaggattgcttcaagtctctggacaccaccttgcagttccccttcaaggagcctgaaaagagaaccatcagcaggccagcagtgggaagcacaaagtattttggcacagccaaagcccgctatgacttctgcgcccgagaccgatcagagctgtcgctcaaggagggtgacatcatcaagatccttaacaagaagggacagcaaggctggtggcgaggggagatctatggccgggttggctggttccctgccaactacgtggaggaagattattctgaatactgctgagccctggtgccttggcagagagacgagaaactccaggctctgagcccggcgtgggcaggcagcggagccaggggctgtgacagctcccggcgggtggagactttgggatggactggaggaggccagcgtccagctggcggtgctcccgggatgtgccctgacatggttaatttataacaccccgatttcctcttgggtcccctcaagcagacggggctcaagggggttacatttaataaaaggatgaagatggatag

SEQ ID NO: 132 - DNA, 2696 bp, Homo sapiens
  source 1..2696: mol_type = genomic DNA
cccgcgtccgacccgcggatcccgcggcgtccggcccgggtggtctggatcgcggagggaatgccccggagggcggagaactgggacgaggccgaggtaggcgcggaggaggcaggcgtcgaagagtacggccctgaagaagacggcggggaggagtcgggcgccgaggagtccggcccggaagagtccggcccggaggaactgggcgccgaggaggagatggaggccgggcggccgcggcccgtgctgcgctcggtgaactcgcgcgagccctcccaggtcatcttctgcaatcgcagtccgcgcgtcgtgctgcccgtatggctcaacttcgacggcgagccgcagccctacccaacgctgccgcctggcacgggccgccgcatccacagctaccgagtgtatactctgaaagagcgatgcctccaggttgtccggagcctagtcaagcctgagaattacaggagactggacatcgtcaggtcgctctacgaagatctggaagaccacccaaatgtgcagaaagacctggagcggctgacacaggagcgcattgcacatcaacggatgggagattgaagatttctgttgaaacttacactgtttcatctcagcttttgatggtactgatgagtcttgatctagatacaggactggttccttccttagtttcaaagtgtctcattctcagagtaaaataggcaccattgcttaaaagaaagttaactgacttcactaggcattgtgatgtttaggggcaaacatcacaaaatgtaatttaatgcctgcccattagagaagtatttatcaggagaaggtggtggcatttttgcttcctagtaagtcaggacagcttgtatgtaaggaggtttgtataagtaattcagtgggaattgcagcatatcgtttaattttaagaaggcattggcatctgcttttaatggatgtataatacatccattctacatccgtagcggttggtgacttgtctgcctcctgctttgggaagactgaggcatccgtgaggcagggacaagtctttctcctctttgagaccccagtgcctgcacatcatgagccttcagtcagggtttgtcagaggaacaaaccaggggacactttgttagaaagtgcttagaggttctgcctctatttttgttggggggtgggagaggggaccttaaaatgtgtacagtgaacaaatgtcttaaagggaatcatttttgtaggaagcattttttataattttctaagtcgtgcactttctcggtccactcttgttgaagtgctgttttattactgtttctaaactaggattgacattctacagttgtgataatagcatttttgtaacttgccatccgcacagaaaatacgagaaaatctgcatgtttgattatagtattaatggacaaataagtttttgctaaatgtgagtatttctgttcctttttgtaaatatgtgacattcctgattgatttgggtttttttgttgttgttgttttgttttgttttgtttttttgagatggagtctcactcttgtcacccaggctggagtgcagtggcgccatctcggctcactgcaacctctgcctcctgggttcacgtaatcctcctgagtagctgggattacaggcgcctgccaccacgctggccaatttttgtacttttagtagagacagtgtttcgtcatgttggccaggctggtttcaaactcctgacctcaggtgatccgcccacctcagcctcccaaaatggtgggattacaggtgtgtgggccaccgtgcctggctgattcagcattttttatcaggcaggaccaggtggcacttccacctccagcctctggtcctaccaatggattcatggagtagcctggactgtttcatagttttctaaatgtacaaattcttataggctagacttagattcattaactcaaattcaatgcttctatcagactcagttttttgtaactaatagatttttttttccacttttgttctactccttccctaatagctttttaaaaaaatctccccagtagagaaacatttggaaaagacagaaaactaaaaaggaagaaaaaagatccctattagatacacttcttaaatacaatcacattaacattttgagctatttccttccagcctttttagggcagattttggttggtttttacatagttgagattgtactgttcatacagttttataccctttttcatttaactttataacttaaatattgctctatgttagtataagcttttcacaaacattagtatagtctcccttttataattaatgtttgtgggtatttcttggcatgcatctttaattccttatcctagcctttgggcacaattcctgtgctcaaaaatgagagtgacggctggcatggtggctcccgcctgtaatcccagtactttggaaagccaaggtaagaggattgcttgagcccagaacttcaagatgagcctgggctcatagtgagaacccatctatacaaaaaatttttaaaaattagcatggcggcacacatctgtaatcctagctacttggcaggctgaggtgagaagatcattggagtttaggaattggaggctgcagtgagccatgagtatgccactgcactccagcctgggggacagagcaagaccctgcctcaaaaaaaaaaaaaaaaaaaaaa

SEQ ID NO: 133 - DNA, 4131 bp, Homo sapiens
  source 1..4131: mol_type = genomic DNA
ccgttctgctctcgggggcaccttccggggttcctaagccgcggggcccctcgctgcccctcgaggccctttccctgacctaggctttggcctgggctactcgttccggagccgccatgtcgtccgacttcgaaggttacgagcaggacttcgcggtgctcactgcagagatcaccagcaagattgcgagggtcccacgactcccgcctgatgaaaagaaacagatggttgcaaatgtggagaaacagcttgaagaagcgaaagaactgcttgaacagatggatttggaagtccgagagataccaccccaaagtcgagggatgtacagcaacagaatgagaagctacaaacaagaaatgggaaaactcgaaacagattttaaaaggtcacggatcgcctacagtgacgaagtacggaatgagctcctgggggatgatgggaattcctcagagaaccagagggcacatctgctcgataacacagagaggctggaaaggtcatctcggagactagaggctggataccaaatagcagtggaaaccgagcaaattggtcaggagatgttggaaaaccttagtcatgacagagaaaagatacagcgagcacgtgaaagacttcgggaaacagatgctaatttgggaaaaagctccaggattctgacagggatgttgcgaagaatcatccagaaccgcatcctgctcgtcatcctagggatcatcgtggtcatcaccatcctgatggcgatcactttttctgtcagaagacactgatgtatctgctctcccttgataaacagcaacaacagcttgttctgagtaattaagacaaaatggtcacatgaatcattctgttgcgctgacaggccccaggtgaccctctctctccctcaccgccgttgggctgaagtgcaaagagtgtaaaaatattttctattcctgtttgcatgtgggttggtttccttttcgaggtttgtcttcacccagattcgttttttagaggggaaggtgaatgtttatttacctttttgctaatgtcatcaactagccaaaatagccccagtgacactcctagccctctggacgtgtcaagggccgtggtttgggagaggacatgatgagtcagtcacgagagcttctgtttgtcacccgcctcttgttgctgaaaagctcttctgtgatgtctgaggataaaaatgcagcaaaaagcaggggatggagtcagtgaccccgtccagcaagccagccctgttcctacacaggcctcatgaatatagtcatcaacctgcctgagtgctttcattgtaaaggtcggtatttaatgtcggttgtacaggaaattgacttagcactttccctgtttttctattgcataattttttttttaacccaaagatattttttttgctgagcctgcccagtattcactgttcacaactttgattactggctacaagaaatattttcttgccttccccaaatcccatactccccagaatctgctggcaaagtgagccctggtacaggatttaattgtgacctcgtcttccctgacctgtgtaagcatctctgtatcctttcggttttaatatctgcactgccaaaagcagtcctcatacttgcaaaaggtctgacaaggttctctccacatacattccagtatgtaaagagaccatgaatatttcagtaagagcaagaacatgactccatcagtgtgaaatttcaaatgtgattataaatatgggagagtcctataggagggtccaccagagataaacttcacggaaaacgttccctaacctcctttaaaagaatagaggatggcagattgttccaaaaggaatggcttgggtttttaactaacaaatgttagcaagcctttcttgaattcactatgtattcaaacttctaatatgctttgtgatttttttctttcatttctttctgtctgaggtaaccaggaattgcgttcaaaatgagctcatttgtgatcaggcttaaaagttgcccaagctgaggtcgtttccccccagtcacaaagcagaatgtttttctcaagacttcataggcacttactggtccgtactatctttggaatataattagaagctttgaatccttgaaaagcaaacctgttctcttcatcaaaaatgctaaccacctgtgcccgtggatcaatatcacctggatgtagtgcttgatatttttcccaactcagaagaaaaccattatggtttagagaggaaatgcagaatggcagaatccaccagagaaattgcacttatcgaaacaggccaaggcctgcatgtgttcggataaatcatttagtattgtgtaaataaagctgcagcctttacttcggagggatggtgtgggattttggccgagggaagcaggacagagaaggagcaggaagctatgctaattttcctgtcagcttaagggatccgtctcagcaagaatcttgtattctgataacggaatgctgtacgtgctgaccacatctaagaaccattaaaaagcaaggaaacaaacaaacaacccttttctcattccgacacacgaatagtcatcgagtattacaccagcccctctggtggcttccttcaaaactgttgatcttagctaaagtgtataaccagttaccagctgcacttcgcacggccatcccgtccacaatgcagcagactcttcccaaggccacctagcaagcaaggttgatcggatcatctaaactggccgcctcctgaatatttcactgaatcctggcgttcatgttgaagcagacaaaatgagaaaggaggagggcattgctcacctctcaatagcttttttcgttcaagttctatgtctttatcagctcttgcctgtgattttaccccaattcaaccttgggagtgggaagaatatgaacagataacccttggcctaacagctccatcaaacctccttgagagcaactacctaggccaggctagtgagtgctttgtgaggaagctggtcagaaggttccctcaactccttcctggtcctcctggacactgcagaaaagacttaggggatccccagcagaggccaattgctctccttccttccctgccccaccaggaaaggaataacgtccacagacttgaagcagatagtgaagtagatctgtgagaggttctaggtacttagtgtgtagactttgacgaatatttctcaagttgggagcccttgttaaaaatgatgtttaagggagtggttggggggaagatgaaggcatggaggaggaagaagagaaggaagcccttgccatataaaattcatgcagactaaacagtttccctgacagaataaataaagtggatgctaccccactccagaatcaaaagcaatttaattaaagtctcttaagttgtaaagagttttaaatgatccgtgttgaaggcgaatgcctgcaaatgcagtgggtctgacgtcagctgccgggcctgggctgggaggccatttgctattctgtttaaggcaggctggattgtcttattttggaaccagcttggtggggggtttgctttgctactgcttctgagccctgagcttcaaaggctgaaattaatggtgaacaaaattgtgcggctctggccatcccatgcggggcaagcccattgagggttatcattaagtaaagaaataaagagggggaaaaaagcctgcctgttccaaaaacctcatcagataatgacctcagtgattgggttttcattaccaaacagcatccagagattatcaacccatagaagaagggaggggaaaaaaaagaaagaaaggaaaagcaactgtctttctctccctctctttctcctttttttttgcacatcttttctttaaaactgtcagatcatttcagtatttcaaatccgaggaaaacagcctgcctgctgctgtatttgaagttgtaatggtgtcaaaaagtcacgactgactgacagccgtcagtcccagaggggctcattaaatcataaaaacttgacaaggaaataattgcgcattgccagcaacttggcgcctgtttagacgtttttattttctttcattattagtccccaccattacgttcattaacaaattgcattaaacaactgttaagggctaa

SEQ ID NO: 134 - DNA, 2684 bp, Homo sapiens
  source 1..2684: mol_type = genomic DNA
atataaaggcgccgccgtccttacccccaggactcggccccatggagacgccgccggccgccgctggcgcatggcgggtaggagctgtggcgcggggccttccaggagtctgagctatgagtggcccctgtggagagaagcctgtcctggaagccagccccaccatgagtctgtgggaatttgaggacagccacagccgtcagggcaccccaaggccgggtcaagagctggccgctgaggaggcctcggccctggaactgcagatgaaggtggacttcttccggaagctgggctattcatccacggagatccacagcgtcctgcagaagctgggcgtccaggcagacaccaacacggtgctgggtgagctggtgaaacacgggacagccaccgagcgggagcgccagacctcaccggacccctgccctcagctccctctagtcccgcggggtggtggcacccctaaggctcccaacctggagcctccactcccagaagaggaaaaggagggcagcgacctgagaccagtggtcatcgatgggagcaacgtggccatgagccatgggaacaaggaggtcttctcctgccggggcatcctgctggcagtgaactggtttctggagcggggccacacagacatcacagtgtttgtgccatcctggaggaaggagcagcctcggcccgacgtgcccatcacagaccagcacatcctgcgggaactggagaagaagaagatcctggtgttcacaccatcacgacgcgtgggtggcaagcgggtggtgtgctatgacgacagattcattgtgaagctggcctacgagtctgacgggatcgtggtttccaacgacacataccgtgacctccaaggcgagcggcaggagtggaagcgcttcatcgaggagcggctgctcatgtactccttcgtcaatgacaagtttatgccccctgatgacccactgggccggcacgggcccagcctggacaacttcctgcgtaagaagccactcactttggagcacaggaagcagccgtgtccctatggaaggaaatgcacctatgggatcaagtgccgattcttccacccagagcggccaagctgcccccagcgctctgtggcagatgagctccgtgccaatgctctcctctcaccccccagagccccaagcaaggacaaaaatggccggcggccttcaccttcatcccagtccagctctctgctaacagagagtgagcagtgcagcctggatgggaagaagctgggggcccaggcatccccagggtcccgccaagagggtctaacacagacctatgccccatcaggcaggagcctcgcacctagcgggggcagtggcagcagctttgggcccacagactggctcccacagacgctggactcactcccgtacgtctcccaggattgcctggactcgggcattggctccctggagagccagatgtcggaactttggggggttcgaggaggaggccctggtgagccgggcccaccccgagccccttacacgggctacagtccctatggatctgagctcccagccaccgcagccttctctgcctttggccgggccatgggtgctggccacttcagtgtccctgccgactacccacccgcgccccctgcctttccacctcgagagtactggtctgaaccatacccactgcccccacccacatcagtccttcaggagcccccagtgcagagcccaggggctggcaggagcccgtggggcagggcaggcagcctggccaaggagcaggccagcgtgtatactaagctgtgtggtgtgtttcccccgcacctggtggaggctgtgatggggcgcttcccacagctcctggacccccagcagctggctgccgagatcctctcctacaagtcccagcaccccagtgagtaagctgcctgtggctggcaagggcagcacccccagcctccaagggccgtcaggctgggctttgggccattgagcagcccattcccagccctgaggcccaccccagaggctggacagagggaggattcaagtcgggaaggaaacccacaaaccaaagatactgtaggattggttctggcccatgcagcacctctagctgtctgcctcagtgggtcagaagcgatcaccctgttgatacacattgtatctctgtagtttaaggagacgctgccggtaacggcgtcggtccgtggctgaggcccaaaccgtcttttctctcagagggtggggagggaggtgggggcagcagaggcctgggctgggtgccctgtgcacgccaccccacttccgccctacccctgggacgttggccttggctggctagttgggcaccgtgtgcctgccctccaagggcctcctctacgccaatgaggcctcatctgtgctctcgctgggcacgtggcttcatgtcagtaagcaagatgcttcttaataacccaccttctgccccactctattccttatcctgctgcccctgtaggggtcaagggccctccgtctacaccctcttcttctcctccatcctttattcagagtcatctcgcccttccccatgggtgggggaacctgtgtttgtttgtgtgcacatgtaaattttaaatattttaagcagaaagtccttacctcctgtaacacatcaataaagtacaatcattgtgagccctttcaaga

SEQ ID NO: 135 - DNA, 3190 bp, Homo sapiens
  source 1..3190: mol_type = genomic DNA
gtttcttctcctccccctgccccccctccccgcctgaccgcatggctgattcaactccagtgtcaatcaacttctttttcctcctcttcctcatttaaataagtttaaagctcctcctccccccggcccaccaaatctgaactttataaattgggctttgcgcgccccagcccggagtcagaaaggcgaggggcgccgggaactggcgtgtgggactccagacaggagaggctgcgccttccccgcaccgggaccttcgcgacacaccagatcctcgcccctggctcgcgcgaacgcacaggatgaccaccaccctcgtgtctgccaccatcttcgacttgagcgaagttttatgcaagggtaacaagatgctcaactatagtgctcccagtgcagggggttgcctgctggacagaaaggcagtgggcacccctgctggtgggggcttccctcggaggcactcagtcaccctgcccagctccaagttccaccagaaccagctcctcagcagcctcaagggtgagccagcccccgctctgagctcgcgagacagccgcttccgagaccgctccttctcggaagggggcgagcggctgctgcccacccagaagcagcccgggggcggccaggtcaactccagccgctacaagacggagctgtgccgcccctttgaggaaaacggtgcctgtaagtacggggacaagtgccagttcgcacacggcatccacgagctccgcagcctgacccgccaccccaagtacaagacggagctgtgccgcaccttccacaccatcggcttttgcccctacgggccccgctgccacttcatccacaacgctgaagagcgccgtgccctggccggggcccgggacctctccgctgaccgtccccgcctccagcatagctttagctttgctgggtttcccagtgccgctgccaccgccgctgccaccgggctgctggacagccccacgtccatcaccccaccccctattctgagcgccgatgacctcctgggctcacctaccctgcccgatggcaccaataacccttttgccttctccagccaggagctggcaagcctctttgcccctagcatggggctgcccgggggtggctccccgaccaccttcctcttccggcccatgtccgagtcccctcacatgtttgactctccccccagccctcaggattctctctcggaccaggagggctacctgagcagctccagcagcagccacagtggctcagactccccgaccttggacaactcaagacgcctgcccatcttcagcagactttccatctcagatgactaagccagggtagggagggacctcctgcctactccagcccctaccctgcacccacatcccataccctcttctccctacccatcccattccccacaggccctacattaacaaggttaagctcaacccctttcccccagcacctcagaatgtgccctccctctccccctcataaccccacctaacataaggacaagtcaatttgtcagtagcttcttctggcttgaaaccccctccctggattttatagcccacttaccatgcataacagacaagtcccatattttgtcagtagatgcctttttttttccggcttaagccttaagtgccaaatcacaagagaaaaagcagtaacagtttacagaagcaacttagtgccttgtaatctaactttgtcactgtgactacattacctcttcagcgccagagggcacccgtgggcctcccggagcctctgcccatggcggggtggagacccggaaccagcagccccctccactggcgacacaactgcaccttccctcatttcagtctcccgcacacttattcctcctcccctcttcccggtggcacctctccacctgtacccgcccccccaccccccccacccctgccccttggaagagttgttgccagaccagggttttgggggaaacctgtcttgacattcaaaacctttttcttcccgatctgaacccctgttgactaatcttgcctgggtttgtgtaggtctgcaggaaggaaggctgaaaaagcggacgaagattttgacttaagtgggactttgtgatttaattttttcttttttttaagtggggaggaaggggaagctagatggactaggagagacttgattttggtgctaaagttccccagttcatatgtgacatctttttaaaaaaaataacaacaaaaaaaaaatgagagaaaagctaaaaaaaaaaaagtaaggggtgagcagttaatggtattcattccacatacaatatctgtgtaaaacgatttcctgtagaagtagctttaatggtttttgctctagaataccgtaggtctatccttagagcactcacgccatgctttcttccctgggttttaaacttcatataactttcagaaattggagagcaaaaattttgcttgtcactgcacatcaatataaaaaagcttatttaacttatcaaaacgtatttattgccaaactatgcttttttttgttaattttgttcatatttatcgggatgacaaatccatagaatatattcttttatgttaaattatgatcttcatattaatcttaaaattttgtgacgtgtctttttcctttttttccacagttttaatatattattcttcaacgacattttttgtaactttacacttttttggttattttattttaaaaaaatgaaaaattaatttaaaaaaatgcaaaaaactgttggattatttattttagaaattcccccctttgtgttggactgcaaattgagtttctttctctttaggcctttcacaactaggactgagaatgtatgtaaaagttctgtgacagtacagaaggaaaacaactttttatgtatagcttctaaaaggggaaaaaaaaaaaaagagaaaccctttgacttccacgtgcccatctcaagacattccactcacagatttgaggttctggattccaggtctggagttttccaatgttaatgtaaacagaactggcacacacacattaagatgaatgtaattattattcctcttgctggtcactaccgtcgctttctatttctctttctttgtgtgaatttatttaaaagaaaaaaaaactttttgtaacgactatttgcagtttaaaaatcaataaaccccgttttttcaagaaa

SEQ ID NO: 136 - DNA, 20 bp, synthetic construct
  source 1..20: mol_type = other DNA
atacggtaggcgtagatgaa

SEQ ID NO: 137 - DNA, 20 bp, synthetic construct
  source 1..20: mol_type = other DNA
gatacggtaggcgtagatga

SEQ ID NO: 138 - DNA, 20 bp, synthetic construct
  source 1..20: mol_type = other DNA
gcggaactcgcggatacggt

SEQ ID NO: 139 - DNA, 20 bp, synthetic construct
  source 1..20: mol_type = other DNA
tagcatgggagtcaggccga

SEQ ID NO: 140 - DNA, 20 bp, synthetic construct
  source 1..20: mol_type = other DNA
aagcagttgatgatgtgtag

SEQ ID NO: 141 - DNA, 20 bp, synthetic construct
  source 1..20: mol_type = other DNA
ggatgcggatggcaatgtag

SEQ ID NO: 142 - DNA, 20 bp, synthetic construct
  source 1..20: mol_type = other DNA
agtagttggtgacgttctgc

SEQ ID NO: 143 - DNA, 20 bp, synthetic construct
  source 1..20: mol_type = other DNA
ggacgaagcaggcaatgaag

SEQ ID NO: 144 - DNA, 20 bp, synthetic construct
  source 1..20: mol_type = other DNA
acagcgtggagcctatgttc

SEQ ID NO: 145 - DNA, 20 bp, synthetic construct
  source 1..20: mol_type = other DNA
aagagaactgtaccatacac

SEQ ID NO: 146 - DNA, 20 bp, synthetic construct
  source 1..20: mol_type = other DNA
aatgagctgcagccctgagt

SEQ ID NO: 147 - DNA, 20 bp, synthetic construct
  source 1..20: mol_type = other DNA
tcagcgcgttcgcttcacca

SEQ ID NO: 148 - DNA, 20 bp, synthetic construct
  source 1..20: mol_type = other DNA
gaggagctcacgcaccatgt

SEQ ID NO: 149 - DNA, 20 bp, synthetic construct
  source 1..20: mol_type = other DNA
accacaatataagtgatccc

SEQ ID NO: 150 - DNA, 20 bp, synthetic construct
  source 1..20: mol_type = other DNA
tagctcatagtggagtatct

SEQ ID NO: 151 - DNA, 20 bp, synthetic construct
  source 1..20: mol_type = other DNA
caacttagatccctacatcc

SEQ ID NO: 152 - DNA, 20 bp, synthetic construct
  source 1..20: mol_type = other DNA
tcctacagtactgaactcca

SEQ ID NO: 153 - DNA, 20 bp, synthetic construct
  source 1..20: mol_type = other DNA
gttcagtactgtaggaggat

SEQ ID NO: 154 - DNA, 20 bp, synthetic construct
  source 1..20: mol_type = other DNA
aggtcatgaaccagattccc

SEQ ID NO: 155 - DNA, 20 bp, synthetic construct
  source 1..20: mol_type = other DNA
gtaaacccatgccactaaga

SEQ ID NO: 156 - DNA, 20 bp, synthetic construct
  source 1..20: mol_type = other DNA
tccatgaggcgaatagatgc

SEQ ID NO: 157 - DNA, 20 bp, synthetic construct
  source 1..20: mol_type = other DNA
gtatcataccaattggtggt

SEQ ID NO: 158 - DNA, 20 bp, synthetic construct
  source 1..20: mol_type = other DNA
acagaaggaggtgtatcact

SEQ ID NO: 159 - DNA, 20 bp, synthetic construct
  source 1..20: mol_type = other DNA
ggaggaacaagtgtttcata

SEQ ID NO: 160 - DNA, 20 bp, synthetic construct
  source 1..20: mol_type = other DNA
gtgtctgtgaaggagattgg

SEQ ID NO: 161 - DNA, 20 bp, synthetic construct
  source 1..20: mol_type = other DNA
tccggaggacagatacacac

SEQ ID NO: 162 - DNA, 20 bp, synthetic construct
  source 1..20: mol_type = other DNA
agagttggcagcaacatgca

SEQ ID NO: 163 - DNA, 20 bp, synthetic construct
  source 1..20: mol_type = other DNA
gtgagcctgagaggaagatg

SEQ ID NO: 164 - DNA, 20 bp, synthetic construct
  source 1..20: mol_type = other DNA
actggcgggagagccaacag

SEQ ID NO: 165 - DNA, 20 bp, synthetic construct
  source 1..20: mol_type = other DNA
agaatcctgccagtccagaa

SEQ ID NO: 166 - DNA, 20 bp, synthetic construct
  source 1..20: mol_type = other DNA
gggtagtatactgaccttgt

SEQ ID NO: 167 - DNA, 20 bp, synthetic construct
  source 1..20: mol_type = other DNA
ggaaggctgacgcggagata

SEQ ID NO: 168 - DNA, 20 bp, synthetic construct
  source 1..20: mol_type = other DNA
gaaactgtagaagtacatgc

SEQ ID NO: 169 - DNA, 20 bp, synthetic construct
  source 1..20: mol_type = other DNA
gtttctgagaagaatcagtg

SEQ ID NO: 170 - DNA, 20 bp, synthetic construct
  source 1..20: mol_type = other DNA
actgtgttgctggtaattgt

SEQ ID NO: 171 - DNA, 20 bp, synthetic construct
  source 1..20: mol_type = other DNA
ttaccgcagctagtgcatca

SEQ ID NO: 172 - DNA, 20 bp, synthetic construct
  source 1..20: mol_type = other DNA
acagtatgaacaccttgtac

SEQ ID NO: 173 - DNA, 20 bp, synthetic construct
  source 1..20: mol_type = other DNA
ggtttctgagaagaatcagt

SEQ ID NO: 174 - DNA, 20 bp, synthetic construct
  source 1..20: mol_type = other DNA
gcagcgttagaacaacttct

SEQ ID NO: 175 - DNA, 20 bp, synthetic construct
  source 1..20: mol_type = other DNA
aggggtagaggacgacgaca

SEQ ID NO: 176 - DNA, 20 bp, synthetic construct
  source 1..20: mol_type = other DNA
gctgacaggccagagagagt

SEQ ID NO: 177 - DNA, 20 bp, synthetic construct
  source 1..20: mol_type = other DNA
agagcttggcagcattctgt

SEQ ID NO: 178 - DNA, 20 bp, synthetic construct
  source 1..20: mol_type = other DNA
ctaggagattggaagactca

SEQ ID NO: 179 - DNA, 20 bp, synthetic construct
  source 1..20: mol_type = other DNA
cctgtacccgaataaccatg

SEQ ID NO: 180 - DNA, 20 bp, synthetic construct
  source 1..20: mol_type = other DNA
gtagaataagtacttcttga

SEQ ID NO: 181 - DNA, 20 bp, synthetic construct
  source 1..20: mol_type = other DNA
gacatagaggactattacgt

SEQ ID NO: 182 - DNA, 20 bp, synthetic construct
  source 1..20: mol_type = other DNA
actgcatacacactgcacag

SEQ ID NO: 183 - DNA, 20 bp, synthetic construct
  source 1..20: mol_type = other DNA
acacactgcacagtggtgag

SEQ ID NO: 184 - DNA, 20 bp, synthetic construct
  source 1..20: mol_type = other DNA
tgtctgtgtgatgatagtat

SEQ ID NO: 185 - DNA, 20 bp, synthetic construct
  source 1..20: mol_type = other DNA
agggttagaggcgagattaa

SEQ ID NO: 186 - DNA, 20 bp, synthetic construct
  source 1..20: mol_type = other DNA
agcaaggactggctgagcag

SEQ ID NO: 187 - DNA, 20 bp, synthetic construct
  source 1..20: mol_type = other DNA
tgagcagagggcagaactcc

SEQ ID NO: 188 - DNA, 20 bp, synthetic construct
  source 1..20: mol_type = other DNA
tatctattcacttacctcat

SEQ ID NO: 189 - DNA, 20 bp, synthetic construct
  source 1..20: mol_type = other DNA
agactctgttgtgttaatta

SEQ ID NO: 190 - DNA, 20 bp, synthetic construct
  source 1..20: mol_type = other DNA
ttaattaggggctgacaagg

SEQ ID NO: 191 - DNA, 20 bp, synthetic construct
  source 1..20: mol_type = other DNA
acacagacaactcttcgctt

SEQ ID NO: 192 - DNA, 20 bp, synthetic construct
  source 1..20: mol_type = other DNA
agagccctgaggatgatgac

SEQ ID NO: 193 - DNA, 20 bp, synthetic construct
  source 1..20: mol_type = other DNA
gcacctgacagaggcactga

SEQ ID NO: 194 - DNA, 20 bp, synthetic construct
  source 1..20: mol_type = other DNA
atgatgacaggaaggtccga

SEQ ID NO: 195 - DNA, 20 bp, synthetic construct
  source 1..20: mol_type = other DNA
ccatgctgcggagagagatc

SEQ ID NO: 196 - DNA, 20 bp, synthetic construct
  source 1..20: mol_type = other DNA
gacttctctgagcagcaact

SEQ ID NO: 197 - DNA, 20 bp, synthetic construct
  source 1..20: mol_type = other DNA
tccaggctctcatattcctg

SEQ ID NO: 198 - DNA, 20 bp, synthetic construct
  source 1..20: mol_type = other DNA
gaaggctgacaagctccatg

SEQ ID NO: 199 - DNA, 20 bp, synthetic construct
  source 1..20: mol_type = other DNA
gctccttcagtgcctctgtc

SEQ ID NO: 200 - DNA, 20 bp, synthetic construct
  source 1..20: mol_type = other DNA
ggaggatgcagaatccctca

SEQ ID NO: 201 - DNA, 20 bp, synthetic construct
  source 1..20: mol_type = other DNA
acccacactcgaattcactc

SEQ ID NO: 202 - DNA, 20 bp, synthetic construct
  source 1..20: mol_type = other DNA
aggaggatgcagaatccctc

SEQ ID NO: 203 - DNA, 20 bp, synthetic construct
  source 1..20: mol_type = other DNA
gatctagattgatcacacta

SEQ ID NO: 204 - DNA, 20 bp, synthetic construct
  source 1..20: mol_type = other DNA
gatcctgagatcaaccctga

SEQ ID NO: 205 - DNA, 20 bp, synthetic construct
  source 1..20: mol_type = other DNA
aaggttgagaagaacatcac

SEQ ID NO: 206 - DNA, 20 bp, synthetic construct
  source 1..20: mol_type = other DNA
agccacaagaccgtccatac

SEQ ID NO: 207 - DNA, 20 bp, synthetic construct
  source 1..20: mol_type = other DNA
tggcgaggttgcccttgtag

SEQ ID NO: 208 - DNA, 20 bp, synthetic construct
  source 1..20: mol_type = other DNA
agtagaggcaatccccccaa

SEQ ID NO: 209 - DNA, 20 bp, synthetic construct
  source 1..20: mol_type = other DNA
agtaaacgatacaggagcca

SEQ ID NO: 210 - DNA, 20 bp, synthetic construct
  source 1..20: mol_type = other DNA
ctggacatctggaacatcca

SEQ ID NO: 211 - DNA, 20 bp, synthetic construct
  source 1..20: mol_type = other DNA
taatcccatatctggacatc

SEQ ID NO: 212 - DNA, 20 bp, synthetic construct
  source 1..20: mol_type = other DNA
catctggaacatccatggta

SEQ ID NO: 213 - DNA, 20 bp, synthetic construct
  source 1..20: mol_type = other DNA
agatagacaaacaagttgga

SEQ ID NO: 214 - DNA, 20 bp, synthetic construct
  source 1..20: mol_type = other DNA
agtttctgatagcagtactt

SEQ ID NO: 215 - DNA, 20 bp, synthetic construct
  source 1..20: mol_type = other DNA
agcaaacagaagcaagcacc

SEQ ID NO: 216 - DNA, 20 bp, synthetic construct
  source 1..20: mol_type = other DNA
gcatgcagtcacccagctcc

SEQ ID NO: 217 - DNA, 20 bp, synthetic construct
  source 1..20: mol_type = other DNA
tgacggctacatcagccacc

SEQ ID NO: 218 - DNA, 20 bp, synthetic construct
  source 1..20: mol_type = other DNA
gtgacggctacatcagccac

SEQ ID NO: 219 - DNA, 20 bp, synthetic construct
  source 1..20: mol_type = other DNA
ggtggctgatgtagccgtca

SEQ ID NO: 220 - DNA, 20 bp, synthetic construct
  source 1..20: mol_type = other DNA
cacactccgcacctctcgga

SEQ ID NO: 221 - DNA, 20 bp, synthetic construct
  source 1..20: mol_type = other DNA
gtcagtgtcaaactcctcga

SEQ ID NO: 222 - DNA, 20 bp, synthetic construct
  source 1..20: mol_type = other DNA
tgcagtcacccagctcccgg

SEQ ID NO: 223 - DNA, 20 bp, synthetic construct
  source 1..20: mol_type = other DNA
tcaccacactccgcacctct

SEQ ID NO: 224 - DNA, 20 bp, synthetic construct
  source 1..20: mol_type = other DNA
tgaccatataaaagttacac

SEQ ID NO: 225 - DNA, 20 bp, synthetic construct
  source 1..20: mol_type = other DNA
taatctggtggacctcatga

SEQ ID NO: 226 - DNA, 20 bp, synthetic construct
  source 1..20: mol_type = other DNA
tgatacgaaagttatctccc

SEQ ID NO: 227 - DNA, 20 bp, synthetic construct
  source 1..20: mol_type = other DNA
tagtcccaaacacatcccga

SEQ ID NO: 228 - DNA, 20 bp, synthetic construct
  source 1..20: mol_type = other DNA
ggattataactcctcccatc

SEQ ID NO: 229 - DNA, 20 bp, synthetic construct
  source 1..20: mol_type = other DNA
aagaatatgatgttcctccc

SEQ ID NO: 230 - DNA, 20 bp, synthetic construct
  source 1..20: mol_type = other DNA
tgtgacacatccaggttaca

SEQ ID NO: 231 - DNA, 20 bp, synthetic construct
  source 1..20: mol_type = other DNA
agatccaggcgaggaggcac

SEQ ID NO: 232 - DNA, 20 bp, synthetic construct
  source 1..20: mol_type = other DNA
aatgaaggcactctcagttc

SEQ ID NO: 233 - DNA, 20 bp, synthetic construct
  source 1..20: mol_type = other DNA
attgtggacatccagtctgg

SEQ ID NO: 234 - DNA, 20 bp, synthetic construct
  source 1..20: mol_type = other DNA
gcaattgtggacatccagtc

SEQ ID NO: 235 - DNA, 20 bp, synthetic construct
  source 1..20: mol_type = other DNA
agaaaaggtctgggtaatgc

SEQ ID NO: 236 - DNA, 20 bp, synthetic construct
  source 1..20: mol_type = other DNA
aggttggaaaggatgtccag

SEQ ID NO: 237 - DNA, 20 bp, synthetic construct
  source 1..20: mol_type = other DNA
gtaagcaccccaagcaatga

SEQ ID NO: 238 - DNA, 20 bp, synthetic construct
  source 1..20: mol_type = other DNA
gacagggaactacacagtga

SEQ ID NO: 239 - DNA, 20 bp, synthetic construct
  source 1..20: mol_type = other DNA
acataccttgaagggccaca

SEQ ID NO: 240 - DNA, 20 bp, synthetic construct
  source 1..20: mol_type = other DNA
aggtggtggaggaggatgtt

SEQ ID NO: 241 - DNA, 20 bp, synthetic construct
  source 1..20: mol_type = other DNA
ggtgcctgggaacgatgacc

SEQ ID NO: 242 - DNA, 20 bp, synthetic construct
  source 1..20: mol_type = other DNA
caagttgatgtcctgaccca

SEQ ID NO: 243 - DNA, 20 bp, synthetic construct
  source 1..20: mol_type = other DNA
atacaagtccaggagatctt

SEQ ID NO: 244 - DNA, 20 bp, synthetic construct
  source 1..20: mol_type = other DNA
acagctgacaggctcgacac

SEQ ID NO: 245 - DNA, 20 bp, synthetic construct
  source 1..20: mol_type = other DNA
ctggacatctatctcatcat

SEQ ID NO: 246 - DNA, 20 bp, synthetic construct
  source 1..20: mol_type = other DNA
cttgtagatatcctgatcat

SEQ ID NO: 247 - DNA, 20 bp, synthetic construct
  source 1..20: mol_type = other DNA
agagtagctactgaagaaag

SEQ ID NO: 248 - DNA, 20 bp, synthetic construct
  source 1..20: mol_type = other DNA
ataggacacattgccatccc

SEQ ID NO: 249 - DNA, 20 bp, synthetic construct
  source 1..20: mol_type = other DNA
cagatatactggtgacctcc

SEQ ID NO: 250 - DNA, 20 bp, synthetic construct
  source 1..20: mol_type = other DNA
acagtcctgagtgagattca

SEQ ID NO: 251 - DNA, 20 bp, synthetic construct
  source 1..20: mol_type = other DNA
gctccctctgtaccaagcat

SEQ ID NO: 252 - DNA, 20 bp, synthetic construct
  source 1..20: mol_type = other DNA
ggtgtatcagggcaaaggta

SEQ ID NO: 253 - DNA, 20 bp, synthetic construct
  source 1..20: mol_type = other DNA
ggacagagggagatgccaag

SEQ ID NO: 254 - DNA, 20 bp, synthetic construct
  source 1..20: mol_type = other DNA
gttgagaaaccccgcctaca

SEQ ID NO: 255 - DNA, 20 bp, synthetic construct
  source 1..20: mol_type = other DNA
ccacatggtcagctgatccc

SEQ ID NO: 256 - DNA, 20 bp, synthetic construct
  source 1..20: mol_type = other DNA
gcccaaggtgcagagccgtc

SEQ ID NO: 257 - DNA, 20 bp, synthetic construct
  source 1..20: mol_type = other DNA
gctgtagaactccaccacgc

SEQ ID NO: 258 - DNA, 20 bp, synthetic construct
  source 1..20: mol_type = other DNA
agaagctagtgaagaaatgt

SEQ ID NO: 259 - DNA, 20 bp, synthetic construct
  source 1..20: mol_type = other DNA
catctgtgaaggcaccgtgg

SEQ ID NO: 260 - DNA, 20 bp, synthetic construct
  source 1..20: mol_type = other DNA
atggggacagaagagccccc

SEQ ID NO: 261 - DNA, 20 bp, synthetic construct
  source 1..20: mol_type = other DNA
gcactgggacagcttctgat

SEQ ID NO: 262 - DNA, 20 bp, synthetic construct
  source 1..20: mol_type = other DNA
gcttcaagaaggagccacac

SEQ ID NO: 263 - DNA, 20 bp, synthetic construct
  source 1..20: mol_type = other DNA
accagcgtccagcactcgat

SEQ ID NO: 264 - DNA, 20 bp, synthetic construct
  source 1..20: mol_type = other DNA
ggtagagaggaacactgggt

SEQ ID NO: 265 - DNA, 20 bp, synthetic construct
  source 1..20: mol_type = other DNA
aagtgtagacccacctgata

SEQ ID NO: 266 - DNA, 20 bp, synthetic construct
  source 1..20: mol_type = other DNA
acacaggacaggaacttgga

SEQ ID NO: 267 - DNA, 20 bp, synthetic construct
  source 1..20: mol_type = other DNA
atggcattgagaatgtgtat

SEQ ID NO: 268 - DNA, 20 bp, synthetic construct
  source 1..20: mol_type = other DNA
aaaaggaacctggtcaccca

SEQ ID NO: 269 - DNA, 20 bp, synthetic construct
  source 1..20: mol_type = other DNA
acgcaggtagagaggaacac

SEQ ID NO: 270 - DNA, 20 bp, synthetic construct
  source 1..20: mol_type = other DNA
gtgggccaatacaattgtcc

SEQ ID NO: 271 - DNA, 20 bp, synthetic construct
  source 1..20: mol_type = other DNA
gttggactgaaaaaggaacc

SEQ ID NO: 272 - DNA, 20 bp, synthetic construct
  source 1..20: mol_type = other DNA
ggagaagcactgcagagaca

SEQ ID NO: 273 - DNA, 20 bp, synthetic construct
  source 1..20: mol_type = other DNA
ggaccacgaagagttaaccc

SEQ ID NO: 274 - DNA, 20 bp, synthetic construct
  source 1..20: mol_type = other DNA
gcagtgcttctccaagtccc

SEQ ID NO: 275 - DNA, 20 bp, synthetic construct
  source 1..20: mol_type = other DNA
aagaggttcctgcaggccga

SEQ ID NO: 276 - DNA, 20 bp, synthetic construct
  source 1..20: mol_type = other DNA
tggaccacgaagagttaacc

SEQ ID NO: 277 - DNA, 20 bp, synthetic construct
  source 1..20: mol_type = other DNA
agttctactacagacccccg

SEQ ID NO: 278 - DNA, 20 bp, synthetic construct
  source 1..20: mol_type = other DNA
acatcctggctctcctgcgc

SEQ ID NO: 279 - DNA, 20 bp, synthetic construct
  source 1..20: mol_type = other DNA
tgtcagcgggagccgcccgg

SEQ ID NO: 280 - DNA, 20 bp, synthetic construct
  source 1..20: mol_type = other DNA
tccatctggtaggagcacat

SEQ ID NO: 281 - DNA, 20 bp, synthetic construct
  source 1..20: mol_type = other DNA
tgtggtagacagccacgtgc

SEQ ID NO: 282 - DNA, 20 bp, synthetic construct
  source 1..20: mol_type = other DNA
tgtaccgcctggccatgacc

SEQ ID NO: 283 - DNA, 20 bp, synthetic construct
  source 1..20: mol_type = other DNA
gttcacggtgaccccagacg

SEQ ID NO: 284 - DNA, 20 bp, synthetic construct
  source 1..20: mol_type = other DNA
acaaggggcgcacagactct

SEQ ID NO: 285 - DNA, 20 bp, synthetic construct
  source 1..20: mol_type = other DNA
gcatctcaaacatccaccca

SEQ ID NO: 286 - DNA, 20 bp, synthetic construct
  source 1..20: mol_type = other DNA
agaaggcggatacacatctg

SEQ ID NO: 287 - DNA, 20 bp, synthetic construct
  source 1..20: mol_type = other DNA
gcctatgtgctcctaccaga

SEQ ID NO: 288 - DNA, 20 bp, synthetic construct
  source 1..20: mol_type = other DNA
gagggctacaagcagatgga

SEQ ID NO: 289 - DNA, 20 bp, synthetic construct
  source 1..20: mol_type = other DNA
gccatctggtatgttcgggt

SEQ ID NO: 290 - DNA, 20 bp, synthetic construct
  source 1..20: mol_type = other DNA
agtccccggcaggtatgaca

SEQ ID NO: 291 - DNA, 20 bp, synthetic construct
  source 1..20: mol_type = other DNA
acctacccgaacataccaga

SEQ ID NO: 292 - DNA, 20 bp, synthetic construct
  source 1..20: mol_type = other DNA
ggtggctacgggcagtgtga

SEQ ID NO: 293 - DNA, 20 bp, synthetic construct
  source 1..20: mol_type = other DNA
taaagctgtcaaccagtccc

SEQ ID NO: 294 - DNA, 20 bp, synthetic construct
  source 1..20: mol_type = other DNA
gtgtagccctggctatcagc

SEQ ID NO: 295 - DNA, 20 bp, synthetic construct
  source 1..20: mol_type = other DNA
aagcagtgtgaaaacaccga

SEQ ID NO: 296 - DNA, 20 bp, synthetic construct
  source 1..20: mol_type = other DNA
gtataatcataaccatacca

SEQ ID NO: 297 - DNA, 20 bp, synthetic construct
  source 1..20: mol_type = other DNA
tacctcagacagattcaggc

SEQ ID NO: 298 - DNA, 20 bp, synthetic construct
  source 1..20: mol_type = other DNA
cgtcactacaaggagccccc

SEQ ID NO: 299 - DNA, 20 bp, synthetic construct
  source 1..20: mol_type = other DNA
atgatgaacaaagtcagatc

SEQ ID NO: 300 - DNA, 20 bp, synthetic construct
  source 1..20: mol_type = other DNA
cgaatcgggcggcagagctc

SEQ ID NO: 301 - DNA, 20 bp, synthetic construct
  source 1..20: mol_type = other DNA
tggagaccaagctacatcaa

SEQ ID NO: 302 - DNA, 20 bp, synthetic construct
  source 1..20: mol_type = other DNA
ggagccagagtagtacttaa

SEQ ID NO: 303 - DNA, 20 bp, synthetic construct
  source 1..20: mol_type = other DNA
ttggtcacagattacaactg

SEQ ID NO: 304 - DNA, 20 bp, synthetic construct
  source 1..20: mol_type = other DNA
agaggaggaagtcagaatct

SEQ ID NO: 305 - DNA, 20 bp, synthetic construct
  source 1..20: mol_type = other DNA
cctatgcccaggtagtatgg

SEQ ID NO: 306 - DNA, 20 bp, synthetic construct
  source 1..20: mol_type = other DNA
tacccaccgccatactacct

SEQ ID NO: 307 - DNA, 20 bp, synthetic construct
  source 1..20: mol_type = other DNA
gggactctacatctgcaagg

SEQ ID NO: 308 - DNA, 20 bp, synthetic construct
  source 1..20: mol_type = other DNA
caactcattccccatcatgt

SEQ ID NO: 309 - DNA, 20 bp, synthetic construct
  source 1..20: mol_type = other DNA
gtgtgtgagtatgcatctcc

SEQ ID NO: 310 - DNA, 20 bp, synthetic construct
  source 1..20: mol_type = other DNA
cacgggactctacatctgca

SEQ ID NO: 311 - DNA, 20 bp, synthetic construct
  source 1..20: mol_type = other DNA
tgcccaggtagtatggcggt

SEQ ID NO: 312 - DNA, 20 bp, synthetic construct
  source 1..20: mol_type = other DNA
gggtggcatgaactatgttc

SEQ ID NO: 313 - DNA, 20 bp, synthetic construct
  source 1..20: mol_type = other DNA
cagcaccaccaggtgatagg

SEQ ID NO: 314 - DNA, 20 bp, synthetic construct
  source 1..20: mol_type = other DNA
gctgatgcaggccagcagga

SEQ ID NO: 315 - DNA, 20 bp, synthetic construct
  source 1..20: mol_type = other DNA
gtagcggtcaaagctgatgc

SEQ ID NO: 316 - DNA, 20 bp, synthetic construct
  source 1..20: mol_type = other DNA
cagcagcacggccaggatgt

SEQ ID NO: 317 - DNA, 20 bp, synthetic construct
  source 1..20: mol_type = other DNA
caggatgtgggcatagcagt

SEQ ID NO: 318 - DNA, 20 bp, synthetic construct
  source 1..20: mol_type = other DNA
gcagtaggccatgaccagca

SEQ ID NO: 319 - DNA, 20 bp, synthetic construct
  source 1..20: mol_type = other DNA
agtctgggagggcgaaaagc

SEQ ID NO: 320 - DNA, 20 bp, synthetic construct
  source 1..20: mol_type = other DNA
aagaaggtcctagttatcca

SEQ ID NO: 321 - DNA, 20 bp, synthetic construct
  source 1..20: mol_type = other DNA
tatatggagtatcatcctgg

SEQ ID NO: 322 - DNA, 20 bp, synthetic construct
  source 1..20: mol_type = other DNA
caggatgatactccatataa

SEQ ID NO: 323 - DNA, 20 bp, synthetic construct
  source 1..20: mol_type = other DNA
gtgcgggttgttgagagtgt

SEQ ID NO: 324 - DNA, 20 bp, synthetic construct
  source 1..20: mol_type = other DNA
ccttatatggagtatcatcc

SEQ ID NO: 325 - DNA, 20 bp, synthetic construct
  source 1..20: mol_type = other DNA
tgactgatatacccagtctc

SEQ ID NO: 326 - DNA, 20 bp, synthetic construct
  source 1..20: mol_type = other DNA
tctggtgtgaagagtccagt

SEQ ID NO: 327 - DNA, 20 bp, synthetic construct
  source 1..20: mol_type = other DNA
agggcagaagccttatggat

SEQ ID NO: 328 - DNA, 20 bp, synthetic construct
  source 1..20: mol_type = other DNA
acagaatgaagaacaagcta

SEQ ID NO: 329 - DNA, 20 bp, synthetic construct
  source 1..20: mol_type = other DNA
taaaggatggtcctgagata

SEQ ID NO: 330 - DNA, 20 bp, synthetic construct
  source 1..20: mol_type = other DNA
tgggccatgagtgtgactgt

SEQ ID NO: 331 - DNA, 20 bp, synthetic construct
  source 1..20: mol_type = other DNA
ggatctaccacagtctgacc

SEQ ID NO: 332 - DNA, 20 bp, synthetic construct
  source 1..20: mol_type = other DNA
acttacctcctccccatctt

SEQ ID NO: 333 - DNA, 20 bp, synthetic construct
  source 1..20: mol_type = other DNA
gattctgtccttcataacct

SEQ ID NO: 334 - DNA, 20 bp, synthetic construct
  source 1..20: mol_type = other DNA
ctggctcgatgcctaagatg

SEQ ID NO: 335 - DNA, 20 bp, synthetic construct
  source 1..20: mol_type = other DNA
tggccgaccaccctccagaa

SEQ ID NO: 336 - DNA, 20 bp, synthetic construct
  source 1..20: mol_type = other DNA
gacgccaggacggcaagtgt

SEQ ID NO: 337 - DNA, 20 bp, synthetic construct
  source 1..20: mol_type = other DNA
aagtcgttgccagtacccag

SEQ ID NO: 338 - DNA, 20 bp, synthetic construct
  source 1..20: mol_type = other DNA
acgagcactcaccagcatcc

SEQ ID NO: 339 - DNA, 20 bp, synthetic construct
  source 1..20: mol_type = other DNA
ttggcccgaaccctcaactg

SEQ ID NO: 340 - DNA, 20 bp, synthetic construct
  source 1..20: mol_type = other DNA
gtactgtgtagccaggatgc

SEQ ID NO: 341 - DNA, 20 bp, synthetic construct
  source 1..20: mol_type = other DNA
ggcgtcgtctgtgtacccag

SEQ ID NO: 342 - DNA, 20 bp, synthetic construct
  source 1..20: mol_type = other DNA
ggagaggatccagcccacct

SEQ ID NO: 343 - DNA, 20 bp, synthetic construct
  source 1..20: mol_type = other DNA
cgggcgcggaggatccaggt

SEQ ID NO: 344 - DNA, 20 bp, synthetic construct
  source 1..20: mol_type = other DNA
gagcctggaggagtgttata

SEQ ID NO: 345 - DNA, 20 bp, synthetic construct
  source 1..20: mol_type = other DNA
ggagcctgagcagaaggtgt

SEQ ID NO: 346 - DNA, 20 bp, synthetic construct
  source 1..20: mol_type = other DNA
tcgatagaaaggtaataatg

SEQ ID NO: 347 - DNA, 20 bp, synthetic construct
  source 1..20: mol_type = other DNA
tgaaggtgacctaattgcag

SEQ ID NO: 348 - DNA, 20 bp, synthetic construct
  source 1..20: mol_type = other DNA
atatctgtgaagacacctgt

SEQ ID NO: 349 - DNA, 20 bp, synthetic construct
  source 1..20: mol_type = other DNA
caggctctcaaatccaacag

SEQ ID NO: 350 - DNA, 20 bp, synthetic construct
  source 1..20: mol_type = other DNA
acttgttgctgaaggtacca

SEQ ID NO: 351 - DNA, 20 bp, synthetic construct
  source 1..20: mol_type = other DNA
agatggtagaatcaccaaga

SEQ ID NO: 352 - DNA, 20 bp, synthetic construct
  source 1..20: mol_type = other DNA
taggaggcgggccatcatcc

SEQ ID NO: 353 - DNA, 20 bp, synthetic construct
  source 1..20: mol_type = other DNA
tgtcccagcgcagaaccagt

SEQ ID NO: 354 - DNA, 20 bp, synthetic construct
  source 1..20: mol_type = other DNA
gagggtgagcttcaggacca

SEQ ID NO: 355 - DNA, 20 bp, synthetic construct
  source 1..20: mol_type = other DNA
aaatactccgactacatcaa

SEQ ID NO: 356 - DNA, 20 bp, synthetic construct
  source 1..20: mol_type = other DNA
caggtcctccccatactcca

SEQ ID NO: 357 - DNA, 20 bp, synthetic construct
  source 1..20: mol_type = other DNA
actgatagcccatgcggacc

SEQ ID NO: 358 - DNA, 20 bp, synthetic construct
  source 1..20: mol_type = other DNA
tggctgagtagtagaggacc

SEQ ID NO: 359 - DNA, 20 bp, synthetic construct
  source 1..20: mol_type = other DNA
gcagtggctccgggaacaga

SEQ ID NO: 360 - DNA, 20 bp, synthetic construct
  source 1..20: mol_type = other DNA
acgatggagaggtcattgca

SEQ ID NO: 361 - DNA, 20 bp, synthetic construct
  source 1..20: mol_type = other DNA
ggtgtgtgaggactccatca

SEQ ID NO: 362 - DNA, 20 bp, synthetic construct
  source 1..20: mol_type = other DNA
tgagaagaggaagcccatcc

SEQ ID NO: 363 - DNA, 20 bp, synthetic construct
  source 1..20: mol_type = other DNA
tgggagcctcaatgttaccc

SEQ ID NO: 364 - DNA, 20 bp, synthetic construct
  source 1..20: mol_type = other DNA
catgggcgttagtgacaaga

SEQ ID NO: 365 - DNA, 20 bp, synthetic construct
  source 1..20: mol_type = other DNA
tgggtcatgtggttcggaga

SEQ ID NO: 366 - DNA, 20 bp, synthetic construct
  source 1..20: mol_type = other DNA
tcgccgccgcagcagcccgt

SEQ ID NO: 367 - DNA, 20 bp, synthetic construct
  source 1..20: mol_type = other DNA
gcgggcacaagggtacctac

SEQ ID NO: 368 - DNA, 20 bp, synthetic construct
  source 1..20: mol_type = other DNA
agacacatgtaacagctcca

SEQ ID NO: 369 - DNA, 20 bp, synthetic construct
  source 1..20: mol_type = other DNA
gaaagatcaagggcttctcc

SEQ ID NO: 370 - DNA, 20 bp, synthetic construct
  source 1..20: mol_type = other DNA
ggccttccaagacaccacca

SEQ ID NO: 371 - DNA, 20 bp, synthetic construct
  source 1..20: mol_type = other DNA
tctgtccacagtccctgaga

SEQ ID NO: 372 - DNA, 20 bp, synthetic construct
  source 1..20: mol_type = other DNA
ctcgtgtggggaaagatcaa

SEQ ID NO: 373 - DNA, 20 bp, synthetic construct
  source 1..20: mol_type = other DNA
gcactccacacagaaacacc

SEQ ID NO: 374 - DNA, 20 bp, synthetic construct
  source 1..20: mol_type = other DNA
tggaataggggacctcgtgt

SEQ ID NO: 375 - DNA, 20 bp, synthetic construct
  source 1..20: mol_type = other DNA
acagctcaaggaagcgatcc

SEQ ID NO: 376 - DNA, 20 bp, synthetic construct
  source 1..20: mol_type = other DNA
caggtaggccaggcagatgg

SEQ ID NO: 377 - DNA, 20 bp, synthetic construct
  source 1..20: mol_type = other DNA
gcactgccgaggtagaggaa

SEQ ID NO: 378 - DNA, 20 bp, synthetic construct
  source 1..20: mol_type = other DNA
atggaagccatagagtacat

SEQ ID NO: 379 - DNA, 20 bp, synthetic construct
  source 1..20: mol_type = other DNA
caacagagccgtgatgccca

SEQ ID NO: 380 - DNA, 20 bp, synthetic construct
  source 1..20: mol_type = other DNA
aagccatagagtacatcggt

SEQ ID NO: 381 - DNA, 20 bp, synthetic construct
  source 1..20: mol_type = other DNA
acaggacgtggccagcacct

SEQ ID NO: 382 - DNA, 20 bp, synthetic construct
  source 1..20: mol_type = other DNA
agttgggcgagatgatgctg

SEQ ID NO: 383 - DNA, 20 bp, synthetic construct
  source 1..20: mol_type = other DNA
acaaggccgacatcagctcc

SEQ ID NO: 384 - DNA, 20 bp, synthetic construct
  source 1..20: mol_type = other DNA
aagagaatgatccataccac

SEQ ID NO: 385 - DNA, 20 bp, synthetic construct
  source 1..20: mol_type = other DNA
acaatgcagtgtataaaggt

SEQ ID NO: 386 - DNA, 20 bp, synthetic construct
  source 1..20: mol_type = other DNA
atagtcacattagattcact

SEQ ID NO: 387 - DNA, 20 bp, synthetic construct
  source 1..20: mol_type = other DNA
aatctaatgtgactattctt

SEQ ID NO: 388 - DNA, 20 bp, synthetic construct
  source 1..20: mol_type = other DNA
atggctcgtattgctatcat

SEQ ID NO: 389 - DNA, 20 bp, synthetic construct
  source 1..20: mol_type = other DNA
attacagccagtgtgacatt

SEQ ID NO: 390 - DNA, 20 bp, synthetic construct
  source 1..20: mol_type = other DNA
gccaggtttccagcacacaa

SEQ ID NO: 391 - DNA, 20 bp, synthetic construct
  source 1..20: mol_type = other DNA
gaatatccagacggacactc

SEQ ID NO: 392 - DNA, 20 bp, synthetic construct
  source 1..20: mol_type = other DNA
aggacgtgttcctcatgatc

SEQ ID NO: 393 - DNA, 20 bp, synthetic construct
  source 1..20: mol_type = other DNA
gagcagcggctgtacaaggt

SEQ ID NO: 394 - DNA, 20 bp, synthetic construct
  source 1..20: mol_type = other DNA
ccggaaggccagccccactg

SEQ ID NO: 395 - DNA, 20 bp, synthetic construct
  source 1..20: mol_type = other DNA
atgctgtcaaaccaggacac

SEQ ID NO: 396 - DNA, 20 bp, synthetic construct
  source 1..20: mol_type = other DNA
cttggcgtccgtgaagatgg

SEQ ID NO: 397 - DNA, 20 bp, synthetic construct
  source 1..20: mol_type = other DNA
gaactgaagcgcatcgtcga

SEQ ID NO: 398 - DNA, 20 bp, synthetic construct
  source 1..20: mol_type = other DNA
gatgaccaactcttggatga

SEQ ID NO: 399 - DNA, 20 bp, synthetic construct
  source 1..20: mol_type = other DNA
acaagctggagccagtgtcc

SEQ ID NO: 400 - DNA, 20 bp, synthetic construct
  source 1..20: mol_type = other DNA
cttgtgtagaggctccccca

SEQ ID NO: 401 - DNA, 20 bp, synthetic construct
  source 1..20: mol_type = other DNA
tgggagccacggcaggcatg

SEQ ID NO: 402 - DNA, 20 bp, synthetic construct
  source 1..20: mol_type = other DNA
gttgatagtaatccagccat

SEQ ID NO: 403 - DNA, 20 bp, synthetic construct
  source 1..20: mol_type = other DNA
attactatcaactatctgct

SEQ ID NO: 404 - DNA, 20 bp, synthetic construct
  source 1..20: mol_type = other DNA
caagagacacccgtttacct

SEQ ID NO: 405 - DNA, 20 bp, synthetic construct
  source 1..20: mol_type = other DNA
tatatccaggatgaaagcat

SEQ ID NO: 406 - DNA, 20 bp, synthetic construct
  source 1..20: mol_type = other DNA
caggatggaaagtgaagagt

SEQ ID NO: 407 - DNA, 20 bp, synthetic construct
  source 1..20: mol_type = other DNA
gttgatagtttccaataccc

SEQ ID NO: 408 - DNA, 20 bp, synthetic construct
  source 1..20: mol_type = other DNA
aggattgtaagactatcatc

SEQ ID NO: 409 - DNA, 20 bp, synthetic construct
  source 1..20: mol_type = other DNA
tgctggcggaccccaaccac

SEQ ID NO: 410 - DNA, 20 bp, synthetic construct
  source 1..20: mol_type = other DNA
gaacgccgtaccgacctcca

SEQ ID NO: 411 - DNA, 20 bp, synthetic construct
  source 1..20: mol_type = other DNA
agggcatgggatgtctgaag

SEQ ID NO: 412 - DNA, 20 bp, synthetic construct
  source 1..20: mol_type = other DNA
aaagccgacaataacatgca

SEQ ID NO: 413 - DNA, 20 bp, synthetic construct
  source 1..20: mol_type = other DNA
ccggttgcacaggtagacgt

SEQ ID NO: 414 - DNA, 20 bp, synthetic construct
  source 1..20: mol_type = other DNA
aatctcctgtctcatccagt

SEQ ID NO: 415 - DNA, 20 bp, synthetic construct
  source 1..20: mol_type = other DNA
tgggtctgggtaatacccca

SEQ ID NO: 416 - DNA, 20 bp, synthetic construct
  source 1..20: mol_type = other DNA
actggcaccctatatcccca

SEQ ID NO: 417 - DNA, 20 bp, synthetic construct
  source 1..20: mol_type = other DNA
agttcacctactgtgatgac

SEQ ID NO: 418 - DNA, 20 bp, synthetic construct
  source 1..20: mol_type = other DNA
gatggaggccttgtccagat

SEQ ID NO: 419 - DNA, 20 bp, synthetic construct
  source 1..20: mol_type = other DNA
gtggggcagaggcagctcat

SEQ ID NO: 420 - DNA, 20 bp, synthetic construct
  source 1..20: mol_type = other DNA
actggggctgcaggttgcga

SEQ ID NO: 421 - DNA, 20 bp, synthetic construct
  source 1..20: mol_type = other DNA
gttgtagatgaccgtcccct

SEQ ID NO: 422 - DNA, 20 bp, synthetic construct
  source 1..20: mol_type = other DNA
tgttctcggagtctagcgca

SEQ ID NO: 423 - DNA, 20 bp, synthetic construct
  source 1..20: mol_type = other DNA
gtgccggcggagcaaggaga

SEQ ID NO: 424 - DNA, 20 bp, synthetic construct
  source 1..20: mol_type = other DNA
tgtaggcgtagcgcttccca

SEQ ID NO: 425 - DNA, 20 bp, synthetic construct
  source 1..20: mol_type = other DNA
gagatgtgagagaaggatgt

SEQ ID NO: 426 - DNA, 20 bp, synthetic construct
  source 1..20: mol_type = other DNA
cttgtcatagtagtaacgga

SEQ ID NO: 427 - DNA, 20 bp, synthetic construct
  source 1..20: mol_type = other DNA
acatcatgaccaaggtccat

SEQ ID NO: 428 - DNA, 20 bp, synthetic construct
  source 1..20: mol_type = other DNA
ttgtacagagatgactccgg

SEQ ID NO: 429 - DNA, 20 bp, synthetic construct
  source 1..20: mol_type = other DNA
tggtctgtactccatagcgt

SEQ ID NO: 430 - DNA, 20 bp, synthetic construct
  source 1..20: mol_type = other DNA
tgtgcggcagtggctggagt

SEQ ID NO: 431 - DNA, 20 bp, synthetic construct
  source 1..20: mol_type = other DNA
ggaactgtgcaagatgacca

SEQ ID NO: 432 - DNA, 20 bp, synthetic construct
  source 1..20: mol_type = other DNA
gcagtggaccaatccagcta

SEQ ID NO: 433 - DNA, 20 bp, synthetic construct
  source 1..20: mol_type = other DNA
gtatgagaatgactacccct

SEQ ID NO: 434 - DNA, 20 bp, synthetic construct
  source 1..20: mol_type = other DNA
gtggacagaaacccatgttc

SEQ ID NO: 435 - DNA, 20 bp, synthetic construct
  source 1..20: mol_type = other DNA
gatctctttcctcagacccc

SEQ ID NO: 436 - DNA, 20 bp, synthetic construct
  source 1..20: mol_type = other DNA
tccagaatcccgctatacct

SEQ ID NO: 437 - DNA, 20 bp, synthetic construct
  source 1..20: mol_type = other DNA
ggtatagcgggattctggat

SEQ ID NO: 438 - DNA, 20 bp, synthetic construct
  source 1..20: mol_type = other DNA
acatcacccagtcccgaaca

SEQ ID NO: 439 - DNA, 20 bp, synthetic construct
  source 1..20: mol_type = other DNA
tggggaggaccagtcgtggt

SEQ ID NO: 440 - DNA, 20 bp, synthetic construct
  source 1..20: mol_type = other DNA
acagaagtcaggatgtgcac

SEQ ID NO: 441 - DNA, 20 bp, synthetic construct
  source 1..20: mol_type = other DNA
gatctggaggatcaccgaga

SEQ ID NO: 442 - DNA, 20 bp, synthetic construct
  source 1..20: mol_type = other DNA
aggatgtggatactcctcca

SEQ ID NO: 443 - DNA, 20 bp, synthetic construct
  source 1..20: mol_type = other DNA
ggagaccaagaatacattat

SEQ ID NO: 444 - DNA, 20 bp, synthetic construct
  source 1..20: mol_type = other DNA
ggctgccgtggatgatcaca

SEQ ID NO: 445 - DNA, 20 bp, synthetic construct
  source 1..20: mol_type = other DNA
attatgatgggaaagtacac

SEQ ID NO: 446 - DNA, 20 bp, synthetic construct
  source 1..20: mol_type = other DNA
aataatcaggcataccatct

SEQ ID NO: 447 - DNA, 20 bp, synthetic construct
  source 1..20: mol_type = other DNA
agggttgatagttgtaaaca

SEQ ID NO: 448 - DNA, 20 bp, synthetic construct
  source 1..20: mol_type = other DNA
gttgttagcaaagaagacga

SEQ ID NO: 449 - DNA, 20 bp, synthetic construct
  source 1..20: mol_type = other DNA
agaagacgcccagctttccc

SEQ ID NO: 450 - DNA, 20 bp, synthetic construct
  source 1..20: mol_type = other DNA
aaggtggtagaggaaatgcg

SEQ ID NO: 451 - DNA, 20 bp, synthetic construct
  source 1..20: mol_type = other DNA
gtgagctggacatcttcgtg

SEQ ID NO: 452 - DNA, 20 bp, synthetic construct
  source 1..20: mol_type = other DNA
aaggtactatgcctttgatg

SEQ ID NO: 453 - DNA, 20 bp, synthetic construct
  source 1..20: mol_type = other DNA
ttgctgaatattgtccacca

SEQ ID NO: 454 - DNA, 20 bp, synthetic construct
  source 1..20: mol_type = other DNA
atacacgtcctcgtcgataa

SEQ ID NO: 455 - DNA, 20 bp, synthetic construct
  source 1..20: mol_type = other DNA
gcggaatctggaagatgagc

SEQ ID NO: 456 - DNA, 20 bp, synthetic construct
  source 1..20: mol_type = other DNA
agcggcagcccatctcccca

SEQ ID NO: 457 - DNA, 20 bp, synthetic construct
  source 1..20: mol_type = other DNA
gtggatcaatcagccagtga

SEQ ID NO: 458 - DNA, 20 bp, synthetic construct
  source 1..20: mol_type = other DNA
ggccctgcaggaggctctgt

SEQ ID NO: 459 - DNA, 20 bp, synthetic construct
  source 1..20: mol_type = other DNA
actccccgaggcagtcatgt

SEQ ID NO: 460 - DNA, 20 bp, synthetic construct
  source 1..20: mol_type = other DNA
agtgagggtcaacgtcaagc

SEQ ID NO: 461 - DNA, 20 bp, synthetic construct
  source 1..20: mol_type = other DNA
cccgtagtcaggactccccg

SEQ ID NO: 462 - DNA, 20 bp, synthetic construct
  source 1..20: mol_type = other DNA
aggccgacatgactgcctcg

SEQ ID NO: 463 - DNA, 20 bp, synthetic construct
  source 1..20: mol_type = other DNA
acgctgagtcaaagagggac

SEQ ID NO: 464 - DNA, 20 bp, synthetic construct
  source 1..20: mol_type = other DNA
aggttgagggataccatatg

SEQ ID NO: 465 - DNA, 20 bp, synthetic construct
  source 1..20: mol_type = other DNA
agacactgcatctccaatgc

SEQ ID NO: 466 - DNA, 20 bp, synthetic construct
  source 1..20: mol_type = other DNA
aagaacactgtagaatatgt

SEQ ID NO: 467 - DNA, 20 bp, synthetic construct
  source 1..20: mol_type = other DNA
gagtggtagcagtacaattg

SEQ ID NO: 468 - DNA, 20 bp, synthetic construct
  source 1..20: mol_type = other DNA
acagctcaagcaaaccacac

SEQ ID NO: 469 - DNA, 20 bp, synthetic construct
  source 1..20: mol_type = other DNA
aaaataagagagcttccgta

SEQ ID NO: 470 - DNA, 20 bp, synthetic construct
  source 1..20: mol_type = other DNA
gacccggctctctacccact

SEQ ID NO: 471 - DNA, 20 bp, synthetic construct
  source 1..20: mol_type = other DNA
tgagagcatcactcagcgca

SEQ ID NO: 472 - DNA, 20 bp, synthetic construct
  source 1..20: mol_type = other DNA
gagctgccctgcttacccag

SEQ ID NO: 473 - DNA, 20 bp, synthetic construct
  source 1..20: mol_type = other DNA
gggaaggtgcagagcagtgc

SEQ ID NO: 474 - DNA, 20 bp, synthetic construct
  source 1..20: mol_type = other DNA
gctgtccggaggcacctgtg

SEQ ID NO: 475 - DNA, 20 bp, synthetic construct
  source 1..20: mol_type = other DNA
agcgtggcgtaggtgaaagg

SEQ ID NO: 476 - DNA, 20 bp, synthetic construct
  source 1..20: mol_type = other DNA
cagggccgagatcttcgagg

SEQ ID NO: 477 - DNA, 20 bp, synthetic construct
  source 1..20: mol_type = other DNA
ggaatgggtgtccagggagc

SEQ ID NO: 478 - DNA, 20 bp, synthetic construct
  source 1..20: mol_type = other DNA
gggctgaggtgttaccaggt

SEQ ID NO: 479 - DNA, 20 bp, synthetic construct
  source 1..20: mol_type = other DNA
ggagaagctgagtgccatgc

SEQ ID NO: 480 - DNA, 20 bp, synthetic construct
  source 1..20: mol_type = other DNA
gcagcatgttgacatcggtc

SEQ ID NO: 481 - DNA, 20 bp, synthetic construct
  source 1..20: mol_type = other DNA
acatacaggacctttctgga

SEQ ID NO: 482 - DNA, 20 bp, synthetic construct
  source 1..20: mol_type = other DNA
caagacgggccgcagaacac

SEQ ID NO: 483 - DNA, 20 bp, synthetic construct
  source 1..20: mol_type = other DNA
aaagttccagatggaatggt

SEQ ID NO: 484 - DNA, 20 bp, synthetic construct
  source 1..20: mol_type = other DNA
aggtgttccagttaacatac

SEQ ID NO: 485 - DNA, 20 bp, synthetic construct
  source 1..20: mol_type = other DNA
taactctaacaccatttcct

SEQ ID NO: 486 - DNA, 20 bp, synthetic construct
  source 1..20: mol_type = other DNA
ttagggccacctgtacccca

SEQ ID NO: 487 - DNA, 20 bp, synthetic construct
  source 1..20: mol_type = other DNA
acagtggtggccttccagaa

SEQ ID NO: 488 - DNA, 20 bp, synthetic construct
  source 1..20: mol_type = other DNA
aagcttgtagtagagcccac

SEQ ID NO: 489 - DNA, 20 bp, synthetic construct
  source 1..20: mol_type = other DNA
aggcccggtccagcacaggt

SEQ ID NO: 490 - DNA, 20 bp, synthetic construct
  source 1..20: mol_type = other DNA
tacgtgcccgagtacagctc

SEQ ID NO: 491 - DNA, 20 bp, synthetic construct
  source 1..20: mol_type = other DNA
aggtaccctccgacccacca

SEQ ID NO: 492 - DNA, 20 bp, synthetic construct
  source 1..20: mol_type = other DNA
gaacttaccagccttcgctt

SEQ ID NO: 493 - DNA, 20 bp, synthetic construct
  source 1..20: mol_type = other DNA
gccatctcgccgccacagtg

SEQ ID NO: 494 - DNA, 20 bp, synthetic construct
  source 1..20: mol_type = other DNA
ggtggtctgacagttcgcac

SEQ ID NO: 495 - DNA, 20 bp, synthetic construct
  source 1..20: mol_type = other DNA
agagcccgcaggcgttgcac

SEQ ID NO: 496 - DNA, 20 bp, synthetic construct
  source 1..20: mol_type = other DNA
agactccaagtactttacat

SEQ ID NO: 497 - DNA, 20 bp, synthetic construct
  source 1..20: mol_type = other DNA
atccagtatatggtgtccag

SEQ ID NO: 498 - DNA, 20 bp, synthetic construct
  source 1..20: mol_type = other DNA
taagtggagcctctccgtga

SEQ ID NO: 499 - DNA, 20 bp, synthetic construct
  source 1..20: mol_type = other DNA
taattagtgtgataccttca

SEQ ID NO: 500 - DNA, 20 bp, synthetic construct
  source 1..20: mol_type = other DNA
tgccactggacaccatatac

SEQ ID NO: 501 - DNA, 20 bp, synthetic construct
  source 1..20: mol_type = other DNA
aatgacagcaacaactcagt

SEQ ID NO: 502 - DNA, 20 bp, synthetic construct
  source 1..20: mol_type = other DNA
gtgcgagagttgtaccagta

SEQ ID NO: 503 - DNA, 20 bp, synthetic construct
  source 1..20: mol_type = other DNA
aacactgaatcataccttac

SEQ ID NO: 504 - DNA, 20 bp, synthetic construct
  source 1..20: mol_type = other DNA
cacctgcccgtactgcagga

SEQ ID NO: 505 - DNA, 20 bp, synthetic construct
  source 1..20: mol_type = other DNA
taggtgcctcgagtctttat

SEQ ID NO: 506 - DNA, 20 bp, synthetic construct
  source 1..20: mol_type = other DNA
gattatttgcaacagctcac

SEQ ID NO: 507 - DNA, 20 bp, synthetic construct
  source 1..20: mol_type = other DNA
cttgggccctcctgcagtac

SEQ ID NO: 508 - DNA, 20 bp, synthetic construct
  source 1..20: mol_type = other DNA
agcccacctgcccgtactgc

SEQ ID NO: 509 - DNA, 20 bp, synthetic construct
  source 1..20: mol_type = other DNA
ggccctcctgcagtacgggc

SEQ ID NO: 510 - DNA, 20 bp, synthetic construct
  source 1..20: mol_type = other DNA
ctcctgcagtacgggcaggt

SEQ ID NO: 511 - DNA, 20 bp, synthetic construct
  source 1..20: mol_type = other DNA
tcttgggccctcctgcagta

SEQ ID NO: 512 - DNA, 20 bp, synthetic construct
  source 1..20: mol_type = other DNA
gttgtgatggaatataatcc

SEQ ID NO: 513 - DNA, 20 bp, synthetic construct
  source 1..20: mol_type = other DNA
gatccgcatctgcttcagga

SEQ ID NO: 514 - DNA, 20 bp, synthetic construct
  source 1..20: mol_type = other DNA
agcagatgcggatcatccac

SEQ ID NO: 515 - DNA, 20 bp, synthetic construct
  source 1..20: mol_type = other DNA
taggtggtcagagatcagaa

SEQ ID NO: 516 - DNA, 20 bp, synthetic construct
  source 1..20: mol_type = other DNA
agagatcagaaaggaaacgt

SEQ ID NO: 517 - DNA, 20 bp, synthetic construct
  source 1..20: mol_type = other DNA
agagcattatgggcagacag

SEQ ID NO: 518 - DNA, 20 bp, synthetic construct
  source 1..20: mol_type = other DNA
atcacgttgctgtagatggt

SEQ ID NO: 519 - DNA, 20 bp, synthetic construct
  source 1..20: mol_type = other DNA
gcatacagaatgcctatgac

SEQ ID NO: 520 - DNA, 20 bp, synthetic construct
  source 1..20: mol_type = other DNA
ggtgtagaagcagggcagat

SEQ ID NO: 521 - DNA, 20 bp, synthetic construct
  source 1..20: mol_type = other DNA
gcggctggggtgtagaagca

SEQ ID NO: 522 - DNA, 20 bp, synthetic construct
  source 1..20: mol_type = other DNA
atagcagagacacagacact

SEQ ID NO: 523 - DNA, 20 bp, synthetic construct
  source 1..20: mol_type = other DNA
atgtgactctagcagacagt

SEQ ID NO: 524 - DNA, 20 bp, synthetic construct
  source 1..20: mol_type = other DNA
gtggaatacagagcggaggt

SEQ ID NO: 525 - DNA, 20 bp, synthetic construct
  source 1..20: mol_type = other DNA
gagtcacattctctatggtc

SEQ ID NO: 526 - DNA, 20 bp, synthetic construct
  source 1..20: mol_type = other DNA
tgctgccggatccaaatccc

SEQ ID NO: 527 - DNA, 20 bp, synthetic construct
  source 1..20: mol_type = other DNA
agaagtggaatacagagcgg

SEQ ID NO: 528 - DNA, 20 bp, synthetic construct
  source 1..20: mol_type = other DNA
tggctcatatcccatcaatt

SEQ ID NO: 529 - DNA, 20 bp, synthetic construct
  source 1..20: mol_type = other DNA
aagtcaccacaggacagtac

SEQ ID NO: 530 - DNA, 20 bp, synthetic construct
  source 1..20: mol_type = other DNA
acagtaaccaacctcagtgt

SEQ ID NO: 531 - DNA, 20 bp, synthetic construct
  source 1..20: mol_type = other DNA
actaaaggacaagtcaccac

SEQ ID NO: 532 - DNA, 20 bp, synthetic construct
  source 1..20: mol_type = other DNA
caaaagaggtggatatgtct

SEQ ID NO: 533 - DNA, 20 bp, synthetic construct
  source 1..20: mol_type = other DNA
gatggtaagcctcatcacag

SEQ ID NO: 534 - DNA, 20 bp, synthetic construct
  source 1..20: mol_type = other DNA
aggaaagtcttgctatctaa

SEQ ID NO: 535 - DNA, 20 bp, synthetic construct
  source 1..20: mol_type = other DNA
acacaggtattgcactgcac

SEQ ID NO: 536 - DNA, 20 bp, synthetic construct
  source 1..20: mol_type = other DNA
gcacgtcatcgactacatct

SEQ ID NO: 537 - DNA, 20 bp, synthetic construct
  source 1..20: mol_type = other DNA
gccgctgaccaccctcaaca

SEQ ID NO: 538 - DNA, 20 bp, synthetic construct
  source 1..20: mol_type = other DNA
cagcatcccccagaacaaga

SEQ ID NO: 539 - DNA, 20 bp, synthetic construct
  source 1..20: mol_type = other DNA
aatagtgggatgcgagtcca

SEQ ID NO: 540 - DNA, 20 bp, synthetic construct
  source 1..20: mol_type = other DNA
caatagtgggatgcgagtcc

SEQ ID NO: 541 - DNA, 20 bp, synthetic construct
  source 1..20: mol_type = other DNA
gagggtggtcagcggcgtcc

SEQ ID NO: 542 - DNA, 20 bp, synthetic construct
  source 1..20: mol_type = other DNA
gcgagtccagggcgatctgc

SEQ ID NO: 543 - DNA, 20 bp, synthetic construct
  source 1..20: mol_type = other DNA
tgatgcaggctgacaatagt

SEQ ID NO: 544 - DNA, 20 bp, synthetic construct
  source 1..20: mol_type = other DNA
gtacattgtataaagaccac

SEQ ID NO: 545 - DNA, 20 bp, synthetic construct
  source 1..20: mol_type = other DNA
atagtgatacacatctctcc

SEQ ID NO: 546 - DNA, 20 bp, synthetic construct
  source 1..20: mol_type = other DNA
aagcagcactacttacgtca

SEQ ID NO: 547 - DNA, 20 bp, synthetic construct
  source 1..20: mol_type = other DNA
gtggtctttatacaatgtac

SEQ ID NO: 548 - DNA, 20 bp, synthetic construct
  source 1..20: mol_type = other DNA
agtggataatcctggatcac

SEQ ID NO: 549 - DNA, 20 bp, synthetic construct
  source 1..20: mol_type = other DNA
gcggctgcggacaacaccca

SEQ ID NO: 550 - DNA, 20 bp, synthetic construct
  source 1..20: mol_type = other DNA
acatttagaagctgaagata

SEQ ID NO: 551 - DNA, 20 bp, synthetic construct
  source 1..20: mol_type = other DNA
tttagacaataagtagtctc

SEQ ID NO: 552 - DNA, 20 bp, synthetic construct
  source 1..20: mol_type = other DNA
tgtatagtgagttggtacaa

SEQ ID NO: 553 - DNA, 20 bp, synthetic construct
  source 1..20: mol_type = other DNA
agcctccccaaagtcttggt

SEQ ID NO: 554 - DNA, 20 bp, synthetic construct
  source 1..20: mol_type = other DNA
agtgagttggtacaatggag

SEQ ID NO: 555 - DNA, 20 bp, synthetic construct
  source 1..20: mol_type = other DNA
atagtgacactgaaatggat

SEQ ID NO: 556 - DNA, 20 bp, synthetic construct
  source 1..20: mol_type = other DNA
tacctaccaagactttgggg

SEQ ID NO: 557 - DNA, 20 bp, synthetic construct
  source 1..20: mol_type = other DNA
gtgtatatcagcctcgtgtt

SEQ ID NO: 558 - DNA, 20 bp, synthetic construct
  source 1..20: mol_type = other DNA
tacagcaatgtatagtgagt

SEQ ID NO: 559 - DNA, 20 bp, synthetic construct
  source 1..20: mol_type = other DNA
gtcattgaagaacagtcaga

SEQ ID NO: 560 - DNA, 20 bp, synthetic construct
  source 1..20: mol_type = other DNA
aaagagtgtggagaccatca

SEQ ID NO: 561 - DNA, 20 bp, synthetic construct
  source 1..20: mol_type = other DNA
gcgacagttcagccatcact

SEQ ID NO: 562 - DNA, 20 bp, synthetic construct
  source 1..20: mol_type = other DNA
gaaatatacaagttatatct

SEQ ID NO: 563 - DNA, 20 bp, synthetic construct
  source 1..20: mol_type = other DNA
acatgaactcatccaagtga

SEQ ID NO: 564 - DNA, 20 bp, synthetic construct
  source 1..20: mol_type = other DNA
tgaagtaaaaggagacaatt

SEQ ID NO: 565 - DNA, 20 bp, synthetic construct
  source 1..20: mol_type = other DNA
gttcatgtattgctttgcgt

SEQ ID NO: 566 - DNA, 20 bp, synthetic construct
  source 1..20: mol_type = other DNA
ccagagcatccaaaagagtg

SEQ ID NO: 567 - DNA, 20 bp, synthetic construct
  source 1..20: mol_type = other DNA
tgatggtctccacactcttt

SEQ ID NO: 568 - DNA, 20 bp, synthetic construct
  source 1..20: mol_type = other DNA
ggtactcccaatatacgata

SEQ ID NO: 569 - DNA, 20 bp, synthetic construct
  source 1..20: mol_type = other DNA
accgtagaggtaaagaacta

SEQ ID NO: 570 - DNA, 20 bp, synthetic construct
  source 1..20: mol_type = other DNA
acacattctactcaccatct

SEQ ID NO: 571 - DNA, 20 bp, synthetic construct
  source 1..20: mol_type = other DNA
ttgggtcagagttaaagcca

SEQ ID NO: 572 - DNA, 20 bp, synthetic construct
  source 1..20: mol_type = other DNA
aaatacattaccaaggactt

SEQ ID NO: 573 - DNA, 20 bp, synthetic construct
  source 1..20: mol_type = other DNA
tgagaattcagtgaggatac

SEQ ID NO: 574 - DNA, 20 bp, synthetic construct
  source 1..20: mol_type = other DNA
taaactggatatcagaaagg

SEQ ID NO: 575 - DNA, 20 bp, synthetic construct
  source 1..20: mol_type = other DNA
aggatactggaatcgctaac

SEQ ID NO: 576 - DNA, 20 bp, synthetic construct
  source 1..20: mol_type = other DNA
atagaggcctgattaaatac

SEQ ID NO: 577 - DNA, 20 bp, synthetic construct
  source 1..20: mol_type = other DNA
gacttgtaaacagtacactc

SEQ ID NO: 578 - DNA, 20 bp, synthetic construct
  source 1..20: mol_type = other DNA
acgcagagcaggtcctgagt

SEQ ID NO: 579 - DNA, 20 bp, synthetic construct
  source 1..20: mol_type = other DNA
tgacatcgctgatacctcca

SEQ ID NO: 580 - DNA, 20 bp, synthetic construct
  source 1..20: mol_type = other DNA
gcgttgtacaggcgaatctt

SEQ ID NO: 581 - DNA, 20 bp, synthetic construct
  source 1..20: mol_type = other DNA
tgatgagggagccttctcct

SEQ ID NO: 582 - DNA, 20 bp, synthetic construct
  source 1..20: mol_type = other DNA
agtgtactgtttacaagtcc

SEQ ID NO: 583 - DNA, 20 bp, synthetic construct
  source 1..20: mol_type = other DNA
aaaccaaggcattgtcaccc

SEQ ID NO: 584 - DNA, 20 bp, synthetic construct
  source 1..20: mol_type = other DNA
gcatttgaagggcttctccc

SEQ ID NO: 585 - DNA, 20 bp, synthetic construct
  source 1..20: mol_type = other DNA
aggccccgcactgattgcac

SEQ ID NO: 586 - DNA, 20 bp, synthetic construct
  source 1..20: mol_type = other DNA
ggcaggcgtagttgcagagg

SEQ ID NO: 587 - DNA, 20 bp, synthetic construct
  source 1..20: mol_type = other DNA
tgagccaggccttaccagtg

SEQ ID NO: 588 - DNA, 20 bp, synthetic construct
  source 1..20: mol_type = other DNA
ggcggcgcgcagcaggtcgt

SEQ ID NO: 589 - DNA, 20 bp, synthetic construct
  source 1..20: mol_type = other DNA
acctaccggagtgcgtcctc

SEQ ID NO: 590 - DNA, 20 bp, synthetic construct
  source 1..20: mol_type = other DNA
ggcggcaggcgtagttgcag

SEQ ID NO: 591 - DNA, 20 bp, synthetic construct
  source 1..20: mol_type = other DNA
taaacagcgaagctctttag

SEQ ID NO: 592 - DNA, 20 bp, synthetic construct
  source 1..20: mol_type = other DNA
agacacataaagttacactc

SEQ ID NO: 593 - DNA, 20 bp, synthetic construct
  source 1..20: mol_type = other DNA
gagtaaaagaagctccacac

SEQ ID NO: 594 - DNA, 20 bp, synthetic construct
  source 1..20: mol_type = other DNA
tagctacgcctgtagaagaa

SEQ ID NO: 595 - DNA, 20 bp, synthetic construct
  source 1..20: mol_type = other DNA
gtagctacgcctgtagaaga

SEQ ID NO: 596 - DNA, 20 bp, synthetic construct
  source 1..20: mol_type = other DNA
ctacaggcgtagctacagaa

SEQ ID NO: 597 - DNA, 20 bp, synthetic construct
  source 1..20: mol_type = other DNA
gggcaggtcatgagtcacca

SEQ ID NO: 598 - DNA, 20 bp, synthetic construct
  source 1..20: mol_type = other DNA
ggacacctcaggacccattc

SEQ ID NO: 599 - DNA, 20 bp, synthetic construct
  source 1..20: mol_type = other DNA
ggtcctgaggtgtcctgtga

SEQ ID NO: 600 - DNA, 20 bp, synthetic construct
  source 1..20: mol_type = other DNA
gagggccaggcagtaggcga

SEQ ID NO: 601 - DNA, 20 bp, synthetic construct
  source 1..20: mol_type = other DNA
aaagaagctacccagtgtcc

SEQ ID NO: 602 - DNA, 20 bp, synthetic construct
  source 1..20: mol_type = other DNA
gcgccgcacatacagctgga

SEQ ID NO: 603 - DNA, 20 bp, synthetic construct
  source 1..20: mol_type = other DNA
tcaggtatggaatagagtcc

SEQ ID NO: 604 - DNA, 20 bp, synthetic construct
  source 1..20: mol_type = other DNA
tctgcttcaaaccacacaga

SEQ ID NO: 605 - DNA, 20 bp, synthetic construct
  source 1..20: mol_type = other DNA
caggcagtaggcgagggctc

SEQ ID NO: 606 - DNA, 20 bp, synthetic construct
  source 1..20: mol_type = other DNA
tggcccggtagccattgctg

SEQ ID NO: 607 - DNA, 20 bp, synthetic construct
  source 1..20: mol_type = other DNA
gtacaggtccaaggtcactg

SEQ ID NO: 608 - DNA, 20 bp, synthetic construct
  source 1..20: mol_type = other DNA
agtgaggccagacccacctt

SEQ ID NO: 609 - DNA, 20 bp, synthetic construct
  source 1..20: mol_type = other DNA
tgaccacaccttgagagtca

SEQ ID NO: 610 - DNA, 20 bp, synthetic construct
  source 1..20: mol_type = other DNA
aatggcttactgtcatccac

SEQ ID NO: 611 - DNA, 20 bp, synthetic construct
  source 1..20: mol_type = other DNA
agaaacggtcccctcctgga

SEQ ID NO: 612 - DNA, 20 bp, synthetic construct
  source 1..20: mol_type = other DNA
actgtcatccacaggacaga

SEQ ID NO: 613 - DNA, 20 bp, synthetic construct
  source 1..20: mol_type = other DNA
gatgacggccaccatccagg

SEQ ID NO: 614 - DNA, 20 bp, synthetic construct
  source 1..20: mol_type = other DNA
aggacctcaaagtcatactg

SEQ ID NO: 615 - DNA, 20 bp, synthetic construct
  source 1..20: mol_type = other DNA
tgtgagcaaacaacccatga

SEQ ID NO: 616 - DNA, 20 bp, synthetic construct
  source 1..20: mol_type = other DNA
gggctgtagagggaggcaca

SEQ ID NO: 617 - DNA, 20 bp, synthetic construct
  source 1..20: mol_type = other DNA
ccacaggctccgctctgcaa

SEQ ID NO: 618 - DNA, 20 bp, synthetic construct
  source 1..20: mol_type = other DNA
gctagccgacactcaccttc

SEQ ID NO: 619 - DNA, 20 bp, synthetic construct
  source 1..20: mol_type = other DNA
accatgctgccattgcagag

SEQ ID NO: 620 - DNA, 20 bp, synthetic construct
  source 1..20: mol_type = other DNA
gcagcctgacacgttgatca

SEQ ID NO: 621 - DNA, 20 bp, synthetic construct
  source 1..20: mol_type = other DNA
gaatccgctcagcatcctct

SEQ ID NO: 622 - DNA, 20 bp, synthetic construct
  source 1..20: mol_type = other DNA
ccccagctgagaccttgtgc

SEQ ID NO: 623 - DNA, 20 bp, synthetic construct
  source 1..20: mol_type = other DNA
cccgcacaaggtctcagctg

SEQ ID NO: 624 - DNA, 20 bp, synthetic construct
  source 1..20: mol_type = other DNA
agaggagcacacctttgctg

SEQ ID NO: 625 - DNA, 20 bp, synthetic construct
  source 1..20: mol_type = other DNA
gcagacatggctgatatccc

SEQ ID NO: 626 - DNA, 20 bp, synthetic construct
  source 1..20: mol_type = other DNA
aaatgacacacacagtcact

SEQ ID NO: 627 - DNA, 20 bp, synthetic construct
  source 1..20: mol_type = other DNA
ttaggacaatgattagtctt

SEQ ID NO: 628 - DNA, 20 bp, synthetic construct
  source 1..20: mol_type = other DNA
cattccctcttacctcctcc

SEQ ID NO: 629 - DNA, 20 bp, synthetic construct
  source 1..20: mol_type = other DNA
atacccctgatcttcaaact

SEQ ID NO: 630 - DNA, 20 bp, synthetic construct
  source 1..20: mol_type = other DNA
agatcgcagtaatatagttc

SEQ ID NO: 631 - DNA, 20 bp, synthetic construct
  source 1..20: mol_type = other DNA
aacatgtggagctgaaccca

SEQ ID NO: 632 - DNA, 20 bp, synthetic construct
  source 1..20: mol_type = other DNA
agccaatgatcagtacctca

SEQ ID NO: 633 - DNA, 20 bp, synthetic construct
  source 1..20: mol_type = other DNA
agctatggcccactccatga

SEQ ID NO: 634 - DNA, 20 bp, synthetic construct
  source 1..20: mol_type = other DNA
tgaccttcagcagcactggt

SEQ ID NO: 635 - DNA, 20 bp, synthetic construct
  source 1..20: mol_type = other DNA
gagatacccaaaaccatcac

SEQ ID NO: 636 - DNA, 20 bp, synthetic construct
  source 1..20: mol_type = other DNA
tatgtaatgcagcagccgtg

SEQ ID NO: 637 - DNA, 20 bp, synthetic construct
  source 1..20: mol_type = other DNA
tggtggtagtagcaaccaac

SEQ ID NO: 638 - DNA, 20 bp, synthetic construct
  source 1..20: mol_type = other DNA
tccttctatcatgtaagcta

SEQ ID NO: 639 - DNA, 20 bp, synthetic construct
  source 1..20: mol_type = other DNA
ggtagtagcaaccaacggga

SEQ ID NO: 640 - DNA, 20 bp, synthetic construct
  source 1..20: mol_type = other DNA
tgtgtagagccctgtatccc

SEQ ID NO: 641 - DNA, 20 bp, synthetic construct
  source 1..20: mol_type = other DNA
tcagtgcgtccagggataca

SEQ ID NO: 642 - DNA, 20 bp, synthetic construct
  source 1..20: mol_type = other DNA
tcacctgtgcatatgagctg

SEQ ID NO: 643 - DNA, 20 bp, synthetic construct
  source 1..20: mol_type = other DNA
actgcagggaacctccacca

SEQ ID NO: 644 - DNA, 20 bp, synthetic construct
  source 1..20: mol_type = other DNA
tcactctatatgctctgtac

SEQ ID NO: 645 - DNA, 20 bp, synthetic construct
  source 1..20: mol_type = other DNA
ggatacagggctctacacag

SEQ ID NO: 646 - DNA, 20 bp, synthetic construct
  source 1..20: mol_type = other DNA
aatgtggcgtgtgggatctc

SEQ ID NO: 647 - DNA, 20 bp, synthetic construct
  source 1..20: mol_type = other DNA
gattcatacctgctgatgtg

SEQ ID NO: 648 - DNA, 20 bp, synthetic construct
  source 1..20: mol_type = other DNA
tagtggaataccagcaatgg

SEQ ID NO: 649 - DNA, 20 bp, synthetic construct
  source 1..20: mol_type = other DNA
tatggcataagctaccacta

SEQ ID NO: 650 - DNA, 20 bp, synthetic construct
  source 1..20: mol_type = other DNA
ataagaacaagtttatctcc

SEQ ID NO: 651 - DNA, 20 bp, synthetic construct
  source 1..20: mol_type = other DNA
aggagaacctgaatactccc

SEQ ID NO: 652 - DNA, 20 bp, synthetic construct
  source 1..20: mol_type = other DNA
gatctgtcggacaagcagga

SEQ ID NO: 653 - DNA, 20 bp, synthetic construct
  source 1..20: mol_type = other DNA
agaatcacaagatcctcggc

SEQ ID NO: 654 - DNA, 20 bp, synthetic construct
  source 1..20: mol_type = other DNA
gtaatactccacttgaactg

SEQ ID NO: 655 - DNA, 20 bp, synthetic construct
  source 1..20: mol_type = other DNA
acaatctcatactcaggcac

SEQ ID NO: 656 - DNA, 20 bp, synthetic construct
  source 1..20: mol_type = other DNA
aatatcaggcaaggaattca

SEQ ID NO: 657 - DNA, 20 bp, synthetic construct
  source 1..20: mol_type = other DNA
ggatgcatgcggctagacat

SEQ ID NO: 658 - DNA, 20 bp, synthetic construct
  source 1..20: mol_type = other DNA
gtctagccgcatgcatccag

SEQ ID NO: 659 - DNA, 20 bp, synthetic construct
  source 1..20: mol_type = other DNA
agaaactgggcaatccatac

SEQ ID NO: 660 - DNA, 20 bp, synthetic construct
  source 1..20: mol_type = other DNA
cagcattcggtagaccctga

SEQ ID NO: 661 - DNA, 20 bp, synthetic construct
  source 1..20: mol_type = other DNA
atgtctagccgcatgcatcc

SEQ ID NO: 662 - DNA, 20 bp, synthetic construct
  source 1..20: mol_type = other DNA
gcatgcggctagacatgggt

SEQ ID NO: 663 - DNA, 20 bp, synthetic construct
  source 1..20: mol_type = other DNA
ataaacctgatcccaaaaca

SEQ ID NO: 664 - DNA, 20 bp, synthetic construct
  source 1..20: mol_type = other DNA
agagcatcttccgcatcccc

SEQ ID NO: 665 - DNA, 20 bp, synthetic construct
  source 1..20: mol_type = other DNA
tcgacagcggcaagtacccc

SEQ ID NO: 666 - DNA, 20 bp, synthetic construct
  source 1..20: mol_type = other DNA
atcgacagcggcaagtaccc

SEQ ID NO: 667 - DNA, 20 bp, synthetic construct
  source 1..20: mol_type = other DNA
acaagccggaccctcccacc

SEQ ID NO: 668 - DNA, 20 bp, synthetic construct
  source 1..20: mol_type = other DNA
cgttctcccacaccagcccg

SEQ ID NO: 669 - DNA, 20 bp, synthetic construct
  source 1..20: mol_type = other DNA
gcaggactacaaccgcgagg

SEQ ID NO: 670 - DNA, 20 bp, synthetic construct
  source 1..20: mol_type = other DNA
acgtatgtccatgggagatc

SEQ ID NO: 671 - DNA, 20 bp, synthetic construct
  source 1..20: mol_type = other DNA
tcgttctcccacaccagccc

SEQ ID NO: 672 - DNA, 20 bp, synthetic construct
  source 1..20: mol_type = other DNA
agaaagccccagttacagca

SEQ ID NO: 673 - DNA, 20 bp, synthetic construct
  source 1..20: mol_type = other DNA
gacacatgcctcttccaggt

SEQ ID NO: 674 - DNA, 20 bp, synthetic construct
  source 1..20: mol_type = other DNA
atccagacacatgcccagca

SEQ ID NO: 675 - DNA, 20 bp, synthetic construct
  source 1..20: mol_type = other DNA
caggcctggtgactcgactc

SEQ ID NO: 676 - DNA, 20 bp, synthetic construct
  source 1..20: mol_type = other DNA
gggtgcgtagataatctgac

SEQ ID NO: 677 - DNA, 20 bp, synthetic construct
  source 1..20: mol_type = other DNA
gataccggagtcgagtcacc

SEQ ID NO: 678 - DNA, 20 bp, synthetic construct
  source 1..20: mol_type = other DNA
atatgtaccaagcagttatc

SEQ ID NO: 679 - DNA, 20 bp, synthetic construct
  source 1..20: mol_type = other DNA
attcttggttggatcatatt

SEQ ID NO: 680 - DNA, 20 bp, synthetic construct
  source 1..20: mol_type = other DNA
caggcgttccagctccgaag

SEQ ID NO: 681 - DNA, 20 bp, synthetic construct
  source 1..20: mol_type = other DNA
gtacgagctcccggtcccga

SEQ ID NO: 682 - DNA, 20 bp, synthetic construct
  source 1..20: mol_type = other DNA
ggctggcggccaccaagtgc

SEQ ID NO: 683 - DNA, 20 bp, synthetic construct
  source 1..20: mol_type = other DNA
agaccaagagcgcatcaaag

SEQ ID NO: 684 - DNA, 20 bp, synthetic construct
  source 1..20: mol_type = other DNA
gtagcgcccagggacacgtt

SEQ ID NO: 685 - DNA, 20 bp, synthetic construct
  source 1..20: mol_type = other DNA
cgtgtagagagaggccacca

SEQ ID NO: 686 - DNA, 20 bp, synthetic construct
  source 1..20: mol_type = other DNA
ggtagctgatggtggtcgtc

SEQ ID NO: 687 - DNA, 20 bp, synthetic construct
  source 1..20: mol_type = other DNA
acgacgacgcctacaccccc

SEQ ID NO: 688 - DNA, 20 bp, synthetic construct
  source 1..20: mol_type = other DNA
tggaccacaacagacccaga

SEQ ID NO: 689 - DNA, 20 bp, synthetic construct
  source 1..20: mol_type = other DNA
accaagacctgttaccacca

SEQ ID NO: 690 - DNA, 20 bp, synthetic construct
  source 1..20: mol_type = other DNA
acacactacttactgttata

SEQ ID NO: 691 - DNA, 20 bp, synthetic construct
  source 1..20: mol_type = other DNA
agagccgacttcctcatgac

SEQ ID NO: 692 - DNA, 20 bp, synthetic construct
  source 1..20: mol_type = other DNA
agttggaagcgaatccccca

SEQ ID NO: 693 - DNA, 20 bp, synthetic construct
  source 1..20: mol_type = other DNA
gagaggtggcacaaactgaa

SEQ ID NO: 694 - DNA, 20 bp, synthetic construct
  source 1..20: mol_type = other DNA
tgaaatggaaacttactgtg

SEQ ID NO: 695 - DNA, 20 bp, synthetic construct
  source 1..20: mol_type = other DNA
ataggtagagtacagagaga

SEQ ID NO: 696 - DNA, 20 bp, synthetic construct
  source 1..20: mol_type = other DNA
gcttggtacaggcacctaga

SEQ ID NO: 697 - DNA, 20 bp, synthetic construct
  source 1..20: mol_type = other DNA
gcagtgtatccacagggacc

SEQ ID NO: 698 - DNA, 20 bp, synthetic construct
  source 1..20: mol_type = other DNA
agggtataggatttatgatg

SEQ ID NO: 699 - DNA, 20 bp, synthetic construct
  source 1..20: mol_type = other DNA
taactatagatggtgtaacc

SEQ ID NO: 700 - DNA, 20 bp, synthetic construct
  source 1..20: mol_type = other DNA
gtaacagatgagatgctcca

SEQ ID NO: 701 - DNA, 20 bp, synthetic construct
  source 1..20: mol_type = other DNA
tgtgctattagagaacatgg

SEQ ID NO: 702 - DNA, 20 bp, synthetic construct
  source 1..20: mol_type = other DNA
acacctgtgcagcatccagt

SEQ ID NO: 703 - DNA, 20 bp, synthetic construct
  source 1..20: mol_type = other DNA
agaatccctgcgaagtacct

SEQ ID NO: 704 - DNA, 20 bp, synthetic construct
  source 1..20: mol_type = other DNA
tcagctagactgttattcca

SEQ ID NO: 705 - DNA, 20 bp, synthetic construct
  source 1..20: mol_type = other DNA
aagaactggaagtggataaa

SEQ ID NO: 706 - DNA, 20 bp, synthetic construct
  source 1..20: mol_type = other DNA
ggagttgctgccaatatatt

SEQ ID NO: 707 - DNA, 20 bp, synthetic construct
  source 1..20: mol_type = other DNA
tattcgagataaggatgaat

SEQ ID NO: 708 - DNA, 20 bp, synthetic construct
  source 1..20: mol_type = other DNA
cagctagactgttattccaa

SEQ ID NO: 709 - DNA, 20 bp, synthetic construct
  source 1..20: mol_type = other DNA
atctcgaataagcagcaggc

SEQ ID NO: 710 - DNA, 20 bp, synthetic construct
  source 1..20: mol_type = other DNA
cagcaggctggattctttgg

SEQ ID NO: 711 - DNA, 20 bp, synthetic construct
  source 1..20: mol_type = other DNA
ttaccccgaggaagagatga

SEQ ID NO: 712 - DNA, 20 bp, synthetic construct
  source 1..20: mol_type = other DNA
agataagacagataattccc

SEQ ID NO: 713 - DNA, 20 bp, synthetic construct
  source 1..20: mol_type = other DNA
attatctatagaaagcagac

SEQ ID NO: 714 - DNA, 20 bp, synthetic construct
  source 1..20: mol_type = other DNA
atgggtgacaatgaatggtt

SEQ ID NO: 715 - DNA, 20 bp, synthetic construct
  source 1..20: mol_type = other DNA
ggtctgagtagattactcct

SEQ ID NO: 716 - DNA, 20 bp, synthetic construct
  source 1..20: mol_type = other DNA
aacaactatcgttaccacag

SEQ ID NO: 717 - DNA, 20 bp, synthetic construct
  source 1..20: mol_type = other DNA
aacttgggaagagagtttgc

SEQ ID NO: 718 - DNA, 20 bp, synthetic construct
  source 1..20: mol_type = other DNA
tgaacaggaaataacctatg

SEQ ID NO: 719 - DNA, 20 bp, synthetic construct
  source 1..20: mol_type = other DNA
acgaaacacaccaatccatg

SEQ ID NO: 720 - DNA, 20 bp, synthetic construct
  source 1..20: mol_type = other DNA
agagccattctcccacaacc

SEQ ID NO: 721 - DNA, 20 bp, synthetic construct
  source 1..20: mol_type = other DNA
aaatgaagtaacagttgcac

SEQ ID NO: 722 - DNA, 20 bp, synthetic construct
  source 1..20: mol_type = other DNA
ttgggtcctggagtaaatgc

SEQ ID NO: 723 - DNA, 20 bp, synthetic construct
  source 1..20: mol_type = other DNA
gattggactctcttacagtg

SEQ ID NO: 724 - DNA, 20 bp, synthetic construct
  source 1..20: mol_type = other DNA
tgtttaagaccactctgtgg

SEQ ID NO: 725 - DNA, 20 bp, synthetic construct
  source 1..20: mol_type = other DNA
acatagaactccagaaaggt

SEQ ID NO: 726 - DNA, 20 bp, synthetic construct
  source 1..20: mol_type = other DNA
ggagcacaccgcctggttgt

SEQ ID NO: 727 - DNA, 20 bp, synthetic construct
  source 1..20: mol_type = other DNA
cagtgtttaagaccactctg

SEQ ID NO: 728 - DNA, 20 bp, synthetic construct
  source 1..20: mol_type = other DNA
taggtgaggatgcagcccca

SEQ ID NO: 729 - DNA, 20 bp, synthetic construct
  source 1..20: mol_type = other DNA
gccaggggctgaggtcccgg

SEQ ID NO: 730 - DNA, 20 bp, synthetic construct
  source 1..20: mol_type = other DNA
actcccttgacagtgtacgc

SEQ ID NO: 731 - DNA, 20 bp, synthetic construct
  source 1..20: mol_type = other DNA
gagtccatggggctgacttg

SEQ ID NO: 732 - DNA, 20 bp, synthetic construct
  source 1..20: mol_type = other DNA
agaggatgtgagccaggccc

SEQ ID NO: 733 - DNA, 20 bp, synthetic construct
  source 1..20: mol_type = other DNA
gcggtccctgaggtgcaccg

SEQ ID NO: 734 - DNA, 20 bp, synthetic construct
  source 1..20: mol_type = other DNA
tggtacagctggcattgcca

SEQ ID NO: 735 - DNA, 20 bp, synthetic construct
  source 1..20: mol_type = other DNA
agaaggctgagatcctggag

SEQ ID NO: 736 - DNA, 20 bp, synthetic construct
  source 1..20: mol_type = other DNA
caactataaggactgtgaga

SEQ ID NO: 737 - DNA, 20 bp, synthetic construct
  source 1..20: mol_type = other DNA
tccagaagttccccaagctc

SEQ ID NO: 738 - DNA, 20 bp, synthetic construct
  source 1..20: mol_type = other DNA
agaagcgagccccatcgatg

SEQ ID NO: 739 - DNA, 20 bp, synthetic construct
  source 1..20: mol_type = other DNA
gagctcataggaagtagtgc

SEQ ID NO: 740 - DNA, 20 bp, synthetic construct
  source 1..20: mol_type = other DNA
ccagaagttccccaagctcc

SEQ ID NO: 741 - DNA, 20 bp, synthetic construct
  source 1..20: mol_type = other DNA
gaagaagtaccacatcgatg

SEQ ID NO: 742 - DNA, 20 bp, synthetic construct
  source 1..20: mol_type = other DNA
aaaccttgagagaagtatgg

SEQ ID NO: 743 - DNA, 20 bp, synthetic construct
  source 1..20: mol_type = other DNA
gaggatgggagagggttcat

SEQ ID NO: 744 - DNA, 20 bp, synthetic construct
  source 1..20: mol_type = other DNA
gcagctatcaaccagattct

SEQ ID NO: 745 - DNA, 20 bp, synthetic construct
  source 1..20: mol_type = other DNA
agaggatggaccgcatggga

SEQ ID NO: 746 - DNA, 20 bp, synthetic construct
  source 1..20: mol_type = other DNA
tataacataaaagcattcag

SEQ ID NO: 747 - DNA, 20 bp, synthetic construct
  source 1..20: mol_type = other DNA
gcatgggatggctgcaccac

SEQ ID NO: 748 - DNA, 20 bp, synthetic construct
  source 1..20: mol_type = other DNA
cgcatgggatggctgcacca

SEQ ID NO: 749 - DNA, 20 bp, synthetic construct
  source 1..20: mol_type = other DNA
gtcgtggtagggctcctgag

SEQ ID NO: 750 - DNA, 20 bp, synthetic construct
  source 1..20: mol_type = other DNA
ttacccttctgccaagaatc

SEQ ID NO: 751 - DNA, 20 bp, synthetic construct
  source 1..20: mol_type = other DNA
aggaccgggaatcatatgat

SEQ ID NO: 752 - DNA, 20 bp, synthetic construct
  source 1..20: mol_type = other DNA
aaggtgtgaggccaacacca

SEQ ID NO: 753 - DNA, 20 bp, synthetic construct
  source 1..20: mol_type = other DNA
tgagctggaacgcagccccg

SEQ ID NO: 754 - DNA, 20 bp, synthetic construct
  source 1..20: mol_type = other DNA
ggaggtggccttgggagagt

SEQ ID NO: 755 - DNA, 20 bp, synthetic construct
  source 1..20: mol_type = other DNA
ctacttcgtctactcccagg

SEQ ID NO: 756 - DNA, 20 bp, synthetic construct
  source 1..20: mol_type = other DNA
gaggtgagcagcaggtttga

SEQ ID NO: 757 - DNA, 20 bp, synthetic construct
  source 1..20: mol_type = other DNA
tcaaggagaaaccatcctgg

SEQ ID NO: 758 - DNA, 20 bp, synthetic construct
  source 1..20: mol_type = other DNA
gtagacgaagtagatgccac

SEQ ID NO: 759 - DNA, 20 bp, synthetic construct
  source 1..20: mol_type = other DNA
cacggaccgtgccttcctcc

SEQ ID NO: 760 - DNA, 20 bp, synthetic construct
  source 1..20: mol_type = other DNA
tctaggacttccctacctgt

SEQ ID NO: 761 - DNA, 20 bp, synthetic construct
  source 1..20: mol_type = other DNA
gagcagcaccttgtccatgt

SEQ ID NO: 762 - DNA, 20 bp, synthetic construct
  source 1..20: mol_type = other DNA
acgagcggaaccgacaggta

SEQ ID NO: 763 - DNA, 20 bp, synthetic construct
  source 1..20: mol_type = other DNA
gaatggctacgtcagtgctc

SEQ ID NO: 764 - DNA, 20 bp, synthetic construct
  source 1..20: mol_type = other DNA
caggagccgcgggtccgtga

SEQ ID NO: 765 - DNA, 20 bp, synthetic construct
  source 1..20: mol_type = other DNA
gcactgacgtagccattccc

SEQ ID NO: 766 - DNA, 20 bp, synthetic construct
  source 1..20: mol_type = other DNA
ggcgtactggaacagcttgt

SEQ ID NO: 767 - DNA, 20 bp, synthetic construct
  source 1..20: mol_type = other DNA
cgtgagggatgatgtcacca

SEQ ID NO: 768 - DNA, 20 bp, synthetic construct
  source 1..20: mol_type = other DNA
tcattaaccaggtagcgagt

SEQ ID NO: 769 - DNA, 20 bp, synthetic construct
  source 1..20: mol_type = other DNA
tgtccgtgcacgcccagctc

SEQ ID NO: 770 - DNA, 20 bp, synthetic construct
  source 1..20: mol_type = other DNA
atagcgcagaatctcatctc

SEQ ID NO: 771 - DNA, 20 bp, synthetic construct
  source 1..20: mol_type = other DNA
atatcggcggaccaggtcta

SEQ ID NO: 772 - DNA, 20 bp, synthetic construct
  source 1..20: mol_type = other DNA
tggccttgtggactatgacg

SEQ ID NO: 773 - DNA, 20 bp, synthetic construct
  source 1..20: mol_type = other DNA
ggaatgcgtgccgtacactc

SEQ ID NO: 774 - DNA, 20 bp, synthetic construct
  source 1..20: mol_type = other DNA
agagcggaaatgccctctca

SEQ ID NO: 775 - DNA, 20 bp, synthetic construct
  source 1..20: mol_type = other DNA
ggaatatgcagcgatagcaa

SEQ ID NO: 776 - DNA, 20 bp, synthetic construct
  source 1..20: mol_type = other DNA
ggaagtggagcagttcaccc

SEQ ID NO: 777 - DNA, 20 bp, synthetic construct
  source 1..20: mol_type = other DNA
gggcttcgtacctctcacga

SEQ ID NO: 778 - DNA, 20 bp, synthetic construct
  source 1..20: mol_type = other DNA
tctttgcagaatttatagag

SEQ ID NO: 779 - DNA, 20 bp, synthetic construct
  source 1..20: mol_type = other DNA
agtggagcagttcacccagg

SEQ ID NO: 780 - DNA, 20 bp, synthetic construct
  source 1..20: mol_type = other DNA
gcacgcacagcggtcctggt

SEQ ID NO: 781 - DNA, 20 bp, synthetic construct
  source 1..20: mol_type = other DNA
tggcagaactgtaggccccc

SEQ ID NO: 782 - DNA, 20 bp, synthetic construct
  source 1..20: mol_type = other DNA
tcacgggtcggtccacgatg

SEQ ID NO: 783 - DNA, 20 bp, synthetic construct
  source 1..20: mol_type = other DNA
cagtgatgtctggcacgcgg

SEQ ID NO: 784 - DNA, 20 bp, synthetic construct
  source 1..20: mol_type = other DNA
gatgcggtgcacctggtaga

SEQ ID NO: 785 - DNA, 20 bp, synthetic construct
  source 1..20: mol_type = other DNA
ggacaccccatcgtgcaggt

SEQ ID NO: 786 - DNA, 20 bp, synthetic construct
  source 1..20: mol_type = other DNA
accaggtgcaccgcatcaca

SEQ ID NO: 787 - DNA, 20 bp, synthetic construct
  source 1..20: mol_type = other DNA
aagctcatacgggcctgagt

SEQ ID NO: 788 - DNA, 20 bp, synthetic construct
  source 1..20: mol_type = other DNA
gcacctggtagaaggcgtgc

SEQ ID NO: 789 - DNA, 20 bp, synthetic construct
  source 1..20: mol_type = other DNA
tcatacgggcctgagtggga

SEQ ID NO: 790 - DNA, 20 bp, synthetic construct
  source 1..20: mol_type = other DNA
tgcagcccagcgctcagctc

SEQ ID NO: 791 - DNA, 20 bp, synthetic construct
  source 1..20: mol_type = other DNA
gtggtcttgggagacacgca

SEQ ID NO: 792 - DNA, 20 bp, synthetic construct
  source 1..20: mol_type = other DNA
tgagacagaaggcagccgag

SEQ ID NO: 793 - DNA, 20 bp, synthetic construct
  source 1..20: mol_type = other DNA
gattcggtgcacctggtaga

SEQ ID NO: 794 - DNA, 20 bp, synthetic construct
  source 1..20: mol_type = other DNA
taagccgcacgccttctacc

SEQ ID NO: 795 - DNA, 20 bp, synthetic construct
  source 1..20: mol_type = other DNA
tgggctccaagggtatctcc

SEQ ID NO: 796 - DNA, 20 bp, synthetic construct
  source 1..20: mol_type = other DNA
gagggagggatgcagtcact

SEQ ID NO: 797 - DNA, 20 bp, synthetic construct
  source 1..20: mol_type = other DNA
agtgggcggaaccagcagga

SEQ ID NO: 798 - DNA, 20 bp, synthetic construct
  source 1..20: mol_type = other DNA
agagcggtgagcgtccgcaa

SEQ ID NO: 799 - DNA, 20 bp, synthetic construct
  source 1..20: mol_type = other DNA
tttgctggccgccatagacc

SEQ ID NO: 800 - DNA, 20 bp, synthetic construct
  source 1..20: mol_type = other DNA
gaggatgaagagctccagga

SEQ ID NO: 801 - DNA, 20 bp, synthetic construct
  source 1..20: mol_type = other DNA
atgtgcggacaccataatgc

SEQ ID NO: 802 - DNA, 20 bp, synthetic construct
  source 1..20: mol_type = other DNA
aagtgggcggagaagatccc

SEQ ID NO: 803 - DNA, 20 bp, synthetic construct
  source 1..20: mol_type = other DNA
gctgtgcagggaccttgaga

SEQ ID NO: 804 - DNA, 20 bp, synthetic construct
  source 1..20: mol_type = other DNA
tatggtgtccgcacatgtga

SEQ ID NO: 805 - DNA, 20 bp, synthetic construct
  source 1..20: mol_type = other DNA
aatccagtccccgaagccac

SEQ ID NO: 806 - DNA, 20 bp, synthetic construct
  source 1..20: mol_type = other DNA
gcggtgggcatggtgaagga

SEQ ID NO: 807 - DNA, 20 bp, synthetic construct
  source 1..20: mol_type = other DNA
gggctgcaagggcttcttca

SEQ ID NO: 808 - DNA, 20 bp, synthetic construct
  source 1..20: mol_type = other DNA
attacctgtatgctaatcga

SEQ ID NO: 809 - DNA, 20 bp, synthetic construct
  source 1..20: mol_type = other DNA
tgcaggtccaacccagtgga

SEQ ID NO: 810 - DNA, 20 bp, synthetic construct
  source 1..20: mol_type = other DNA
gctgttgggatggtcaaaga

SEQ ID NO: 811 - DNA, 20 bp, synthetic construct
  source 1..20: mol_type = other DNA
agatgagtttaccctccact

SEQ ID NO: 812 - DNA, 20 bp, synthetic construct
  source 1..20: mol_type = other DNA
gaccagcctggactattcca

SEQ ID NO: 813 - DNA, 20 bp, synthetic construct
  source 1..20: mol_type = other DNA
tacggcgtgcgcacctgtga

SEQ ID NO: 814 - DNA, 20 bp, synthetic construct
  source 1..20: mol_type = other DNA
aacgcggcctgccaacacta

SEQ ID NO: 815 - DNA, 20 bp, synthetic construct
  source 1..20: mol_type = other DNA
cagggcagcaatgcaggaga

SEQ ID NO: 816 - DNA, 20 bp, synthetic construct
  source 1..20: mol_type = other DNA
tacggcgtgcgaacctgcga

SEQ ID NO: 817 - DNA, 20 bp, synthetic construct
  source 1..20: mol_type = other DNA
agtgttggaatggtaaaaga

SEQ ID NO: 818 - DNA, 20 bp, synthetic construct
  source 1..20: mol_type = other DNA
ttggggagatcagtaaatcc

SEQ ID NO: 819 - DNA, 20 bp, synthetic construct
  source 1..20: mol_type = other DNA
gaagtgtctcagtgttggaa

SEQ ID NO: 820 - DNA, 20 bp, synthetic construct
  source 1..20: mol_type = other DNA
gccactccccaaatccacga

SEQ ID NO: 821 - DNA, 20 bp, synthetic construct
  source 1..20: mol_type = other DNA
gctcgagtagccctccacga

SEQ ID NO: 822 - DNA, 20 bp, synthetic construct
  source 1..20: mol_type = other DNA
aaatagtagtaattacctga

SEQ ID NO: 823 - DNA, 20 bp, synthetic construct
  source 1..20: mol_type = other DNA
aacgccgcctgccagcacta

SEQ ID NO: 824 - DNA, 20 bp, synthetic construct
  source 1..20: mol_type = other DNA
gacgccggcgaccagtacca

SEQ ID NO: 825 - DNA, 20 bp, synthetic construct
  source 1..20: mol_type = other DNA
tacagcagccaggttctccc

SEQ ID NO: 826 - DNA, 20 bp, synthetic construct
  source 1..20: mol_type = other DNA
cggtgaaccagatagtgccc

SEQ ID NO: 827 - DNA, 20 bp, synthetic construct
  source 1..20: mol_type = other DNA
atctggttcaccgtgtacaa

SEQ ID NO: 828 - DNA, 20 bp, synthetic construct
  source 1..20: mol_type = other DNA
actggagagttcctgcaggt

SEQ ID NO: 829 - DNA, 20 bp, synthetic construct
  source 1..20: mol_type = other DNA
ggcgtccagcagcagcacgt

SEQ ID NO: 830 - DNA, 20 bp, synthetic construct
  source 1..20: mol_type = other DNA
accagtaccagggcactatc

SEQ ID NO: 831 - DNA, 20 bp, synthetic construct
  source 1..20: mol_type = other DNA
taccatggcatcgtagcgca

SEQ ID NO: 832 - DNA, 20 bp, synthetic construct
  source 1..20: mol_type = other DNA
catagacgtaatctccaaca

SEQ ID NO: 833 - DNA, 20 bp, synthetic construct
  source 1..20: mol_type = other DNA
agactgtgggaggattcagc

SEQ ID NO: 834 - DNA, 20 bp, synthetic construct
  source 1..20: mol_type = other DNA
gaaacacgcagagacctgga

SEQ ID NO: 835 - DNA, 20 bp, synthetic construct
  source 1..20: mol_type = other DNA
aatgacatgtggctgaaggt

SEQ ID NO: 836 - DNA, 20 bp, synthetic construct
  source 1..20: mol_type = other DNA
acagaggccacgcgaaccac

SEQ ID NO: 837 - DNA, 20 bp, synthetic construct
  source 1..20: mol_type = other DNA
caggcagaggcacatcccga

SEQ ID NO: 838 - DNA, 20 bp, synthetic construct
  source 1..20: mol_type = other DNA
tggatttgtagctacaacta

SEQ ID NO: 839 - DNA, 20 bp, synthetic construct
  source 1..20: mol_type = other DNA
aagtattggaacgagcaaga

SEQ ID NO: 840 - DNA, 20 bp, synthetic construct
  source 1..20: mol_type = other DNA
agttggcagtatcatcggaa

SEQ ID NO: 841 - DNA, 20 bp, synthetic construct
  source 1..20: mol_type = other DNA
tccatgcataagtagccgga

SEQ ID NO: 842 - DNA, 20 bp, synthetic construct
  source 1..20: mol_type = other DNA
accatccggctacttatgca

SEQ ID NO: 843 - DNA, 20 bp, synthetic construct
  source 1..20: mol_type = other DNA
cacagctgccagtagacccc

SEQ ID NO: 844 - DNA, 20 bp, synthetic construct
  source 1..20: mol_type = other DNA
taaatgtcactctcaccatc

SEQ ID NO: 845 - DNA, 20 bp, synthetic construct
  source 1..20: mol_type = other DNA
gtagcatatcccctgccacc

SEQ ID NO: 846 - DNA, 20 bp, synthetic construct
  source 1..20: mol_type = other DNA
aatggcatactgtccttgaa

SEQ ID NO: 847 - DNA, 20 bp, synthetic construct
  source 1..20: mol_type = other DNA
tcagggttgaggcacatgga

SEQ ID NO: 848 - DNA, 20 bp, synthetic construct
  source 1..20: mol_type = other DNA
ggagatggccccacagaggt

SEQ ID NO: 849 - DNA, 20 bp, synthetic construct
  source 1..20: mol_type = other DNA
cagcggcacctacctctgtg

SEQ ID NO: 850 - DNA, 20 bp, synthetic construct
  source 1..20: mol_type = other DNA
ggacccagactagcagcacc

SEQ ID NO: 851 - DNA, 20 bp, synthetic construct
  source 1..20: mol_type = other DNA
cctgctcgtggtgaccgaag

SEQ ID NO: 852 - DNA, 20 bp, synthetic construct
  source 1..20: mol_type = other DNA
ccagtggcgagagaagaccc

SEQ ID NO: 853 - DNA, 20 bp, synthetic construct
  source 1..20: mol_type = other DNA
gcccacgacaccaaccacca

SEQ ID NO: 854 - DNA, 20 bp, synthetic construct
  source 1..20: mol_type = other DNA
ccagggagatggccccacag

SEQ ID NO: 855 - DNA, 20 bp, synthetic construct
  source 1..20: mol_type = other DNA
ccatagtccacagagaacac

SEQ ID NO: 856 - DNA, 20 bp, synthetic construct
  source 1..20: mol_type = other DNA
accccccttatagatcagca

SEQ ID NO: 857 - DNA, 20 bp, synthetic construct
  source 1..20: mol_type = other DNA
gaaggcatctcagttaacac

SEQ ID NO: 858 - DNA, 20 bp, synthetic construct
  source 1..20: mol_type = other DNA
aatgacttgcaggtcccatc

SEQ ID NO: 859 - DNA, 20 bp, synthetic construct
  source 1..20: mol_type = other DNA
atagatcagcagggcaggaa

SEQ ID NO: 860 - DNA, 20 bp, synthetic construct
  source 1..20: mol_type = other DNA
gccctgctgatctataaggg

SEQ ID NO: 861 - DNA, 20 bp, synthetic construct
  source 1..20: mol_type = other DNA
attcctggtgaactgactgc

SEQ ID NO: 862 - DNA, 20 bp, synthetic construct
  source 1..20: mol_type = other DNA
agcagcgaatggaagagatg

SEQ ID NO: 863 - DNA, 20 bp, synthetic construct
  source 1..20: mol_type = other DNA
gtactactatagcagcagtg

SEQ ID NO: 864 - DNA, 20 bp, synthetic construct
  source 1..20: mol_type = other DNA
catgagcgtacctgactcca

SEQ ID NO: 865 - DNA, 20 bp, synthetic construct
  source 1..20: mol_type = other DNA
tgtccttgagaagcataata

SEQ ID NO: 866 - DNA, 20 bp, synthetic construct
  source 1..20: mol_type = other DNA
gatattcgaagcttacaaca

SEQ ID NO: 867 - DNA, 20 bp, synthetic construct
  source 1..20: mol_type = other DNA
tatgccaagaacttctacgg

SEQ ID NO: 868 - DNA, 20 bp, synthetic construct
  source 1..20: mol_type = other DNA
ggtgtccttactctcagccc

SEQ ID NO: 869 - DNA, 20 bp, synthetic construct
  source 1..20: mol_type = other DNA
gctgtgatgagatggtctgt

SEQ ID NO: 870 - DNA, 20 bp, synthetic construct
  source 1..20: mol_type = other DNA
gtatgccaagaacttctacg

SEQ ID NO: 871 - DNA, 20 bp, synthetic construct
  source 1..20: mol_type = other DNA
ggtaagtctgcagctccatc

SEQ ID NO: 872 - DNA, 20 bp, synthetic construct
  source 1..20: mol_type = other DNA
tggcagctgagtttataacc

SEQ ID NO: 873 - DNA, 20 bp, synthetic construct
  source 1..20: mol_type = other DNA
tatgcgtaccattagaccaa

SEQ ID NO: 874 - DNA, 20 bp, synthetic construct
  source 1..20: mol_type = other DNA
aaggccaccagacatgtagt

SEQ ID NO: 875 - DNA, 20 bp, synthetic construct
  source 1..20: mol_type = other DNA
tcagctcctactccaaactg

SEQ ID NO: 876 - DNA, 20 bp, synthetic construct
  source 1..20: mol_type = other DNA
gaaggaggctggccacagtt

SEQ ID NO: 877 - DNA, 20 bp, synthetic construct
  source 1..20: mol_type = other DNA
cttaattgtaggttagtcga

SEQ ID NO: 878 - DNA, 20 bp, synthetic construct
  source 1..20: mol_type = other DNA
tgagtttataacctggtcaa

SEQ ID NO: 879 - DNA, 20 bp, synthetic construct
  source 1..20: mol_type = other DNA
aattgctgtaggtgcagcta

SEQ ID NO: 880 - DNA, 20 bp, synthetic construct
  source 1..20: mol_type = other DNA
aaatgaggtaaggaccacca

SEQ ID NO: 881 - DNA, 20 bp, synthetic construct
  source 1..20: mol_type = other DNA
gcttatagacagcatcaact

SEQ ID NO: 882 - DNA, 20 bp, synthetic construct
  source 1..20: mol_type = other DNA
tgggtggaagatcatctaca

SEQ ID NO: 883 - DNA, 20 bp, synthetic construct
  source 1..20: mol_type = other DNA
attctgctctggcaactaca

SEQ ID NO: 884 - DNA, 20 bp, synthetic construct
  source 1..20: mol_type = other DNA
gtggaagatcatctacacgg

SEQ ID NO: 885 - DNA, 20 bp, synthetic construct
  source 1..20: mol_type = other DNA
caggtataagtcctgttgtt

SEQ ID NO: 886 - DNA, 20 bp, synthetic construct
  source 1..20: mol_type = other DNA
atggccttggaagaataggt

SEQ ID NO: 887 - DNA, 20 bp, synthetic construct
  source 1..20: mol_type = other DNA
gacctctgggcagagagtga

SEQ ID NO: 888 - DNA, 20 bp, synthetic construct
  source 1..20: mol_type = other DNA
aaacactacctggtacacac

SEQ ID NO: 889 - DNA, 20 bp, synthetic construct
  source 1..20: mol_type = other DNA
gtaccaggtagtgtttctgc

SEQ ID NO: 890 - DNA, 20 bp, synthetic construct
  source 1..20: mol_type = other DNA
ggagagctggccgaaagtct

SEQ ID NO: 891 - DNA, 20 bp, synthetic construct
  source 1..20: mol_type = other DNA
agagaaaccataccaatgca

SEQ ID NO: 892 - DNA, 20 bp, synthetic construct
  source 1..20: mol_type = other DNA
ccaaccaggaacttcttgtg

SEQ ID NO: 893 - DNA, 20 bp, synthetic construct
  source 1..20: mol_type = other DNA
gaatccagcacactctcccc

SEQ ID NO: 894 - DNA, 20 bp, synthetic construct
  source 1..20: mol_type = other DNA
cagctctccaatctgaaggt

SEQ ID NO: 895 - DNA, 20 bp, synthetic construct
  source 1..20: mol_type = other DNA
aataccacacaagaagttcc

SEQ ID NO: 896 - DNA, 20 bp, synthetic construct
  source 1..20: mol_type = other DNA
attcagcgagaggaacacca

SEQ ID NO: 897 - DNA, 20 bp, synthetic construct
  source 1..20: mol_type = other DNA
aacaagcacctgctcaccca

SEQ ID NO: 898 - DNA, 20 bp, synthetic construct
  source 1..20: mol_type = other DNA
ggagtacctgaagcacatca

SEQ ID NO: 899 - DNA, 20 bp, synthetic construct
  source 1..20: mol_type = other DNA
ttcacggtggatgaccatgt

SEQ ID NO: 900 - DNA, 20 bp, synthetic construct
  source 1..20: mol_type = other DNA
gcttcaggtactccttcccc

SEQ ID NO: 901 - DNA, 20 bp, synthetic construct
  source 1..20: mol_type = other DNA
agtacacctgcgagatctgc

SEQ ID NO: 902 - DNA, 20 bp, synthetic construct
  source 1..20: mol_type = other DNA
cgggaccaaggtgtccacca

SEQ ID NO: 903 - DNA, 20 bp, synthetic construct
  source 1..20: mol_type = other DNA
acctccagagacatcccccc

SEQ ID NO: 904 - DNA, 20 bp, synthetic construct
  source 1..20: mol_type = other DNA
aaagggagattctagtatac

SEQ ID NO: 905 - DNA, 20 bp, synthetic construct
  source 1..20: mol_type = other DNA
agtggatcaccgcaggccca

SEQ ID NO: 906 - DNA, 20 bp, synthetic construct
  source 1..20: mol_type = other DNA
tcaccgcaggcccatggtca

SEQ ID NO: 907 - DNA, 20 bp, synthetic construct
  source 1..20: mol_type = other DNA
gcactacagtggatcaccgc

SEQ ID NO: 908 - DNA, 20 bp, synthetic construct
  source 1..20: mol_type = other DNA
tagaggaaagtcctgtacat

SEQ ID NO: 909 - DNA, 20 bp, synthetic construct
  source 1..20: mol_type = other DNA
ccgcgactcaccaagtacag

SEQ ID NO: 910 - DNA, 20 bp, synthetic construct
  source 1..20: mol_type = other DNA
gcggtgatccactgtagtgc

SEQ ID NO: 911 - DNA, 20 bp, synthetic construct
  source 1..20: mol_type = other DNA
gcgctctggcaccttctctc

SEQ ID NO: 912 - DNA, 20 bp, synthetic construct
  source 1..20: mol_type = other DNA
agaaggcgtagggaggcacc

SEQ ID NO: 913 - DNA, 20 bp, synthetic construct
  source 1..20: mol_type = other DNA
cgaccagatcaccctcctca

SEQ ID NO: 914 - DNA, 20 bp, synthetic construct
  source 1..20: mol_type = other DNA
agaccctcaccaggatgtcc

SEQ ID NO: 915 - DNA, 20 bp, synthetic construct
  source 1..20: mol_type = other DNA
cagcccgtccgagaaggtca

SEQ ID NO: 916 - DNA, 20 bp, synthetic construct
  source 1..20: mol_type = other DNA
ggttggcgaaggcaaagacc

SEQ ID NO: 917 - DNA, 20 bp, synthetic construct
  source 1..20: mol_type = other DNA
gtgtagctctcagagcactc

SEQ ID NO: 918 - DNA, 20 bp, synthetic construct
  source 1..20: mol_type = other DNA
caggcaggcagccttgagga

SEQ ID NO: 919 - DNA, 20 bp, synthetic construct
  source 1..20: mol_type = other DNA
acctccgcagatgaggcaga

SEQ ID NO: 920 - DNA, 20 bp, synthetic construct
  source 1..20: mol_type = other DNA
aaggccgtctgagaaagtca

SEQ ID NO: 921 - DNA, 20 bp, synthetic construct
  source 1..20: mol_type = other DNA
ccagctgggtaaatacacca

SEQ ID NO: 922 - DNA, 20 bp, synthetic construct
  source 1..20: mol_type = other DNA
atggtcaagccagtgaaacc

SEQ ID NO: 923 - DNA, 20 bp, synthetic construct
  source 1..20: mol_type = other DNA
acttctggagtcgacagtat

SEQ ID NO: 924 - DNA, 20 bp, synthetic construct
  source 1..20: mol_type = other DNA
aggcacataccaggatgtcc

SEQ ID NO: 925 - DNA, 20 bp, synthetic construct
  source 1..20: mol_type = other DNA
caggcaggcggccttcagca

SEQ ID NO: 926 - DNA, 20 bp, synthetic construct
  source 1..20: mol_type = other DNA
taagctacaagaaccattgc

SEQ ID NO: 927 - DNA, 20 bp, synthetic construct
  source 1..20: mol_type = other DNA
ttaagcagatggcactgaga

SEQ ID NO: 928 - DNA, 20 bp, synthetic construct
  source 1..20: mol_type = other DNA
tatggggtcagctcttgtga

SEQ ID NO: 929 - DNA, 20 bp, synthetic construct
  source 1..20: mol_type = other DNA
agatggatgacaccgagaca

SEQ ID NO: 930 - DNA, 20 bp, synthetic construct
  source 1..20: mol_type = other DNA
ccagctgggcaagtatacca

SEQ ID NO: 931 - DNA, 20 bp, synthetic construct
  source 1..20: mol_type = other DNA
cagcccgtcggagaaggtca

SEQ ID NO: 932 - DNA, 20 bp, synthetic construct
  source 1..20: mol_type = other DNA
acttaccaggatatctaggc

SEQ ID NO: 933 - DNA, 20 bp, synthetic construct
  source 1..20: mol_type = other DNA
gtcctctggctaccactatg

SEQ ID NO: 934 - DNA, 20 bp, synthetic construct
  source 1..20: mol_type = other DNA
cacaagagctgaccccatag

SEQ ID NO: 935 - DNA, 20 bp, synthetic construct
  source 1..20: mol_type = other DNA
aagtcctctggctaccacta

SEQ ID NO: 936 - DNA, 20 bp, synthetic construct
  source 1..20: mol_type = other DNA
aaaagtatgaggtgatacta

SEQ ID NO: 937 - DNA, 20 bp, synthetic construct
  source 1..20: mol_type = other DNA
actgtgtagaagctaatgaa

SEQ ID NO: 938 - DNA, 20 bp, synthetic construct
  source 1..20: mol_type = other DNA
atgaatagtacatacctata

SEQ ID NO: 939 - DNA, 20 bp, synthetic construct
  source 1..20: mol_type = other DNA
ggagaaaccactctatgtcc

SEQ ID NO: 940 - DNA, 20 bp, synthetic construct
  source 1..20: mol_type = other DNA
agatatcacacattacagtg

SEQ ID NO: 941 - DNA, 20 bp, synthetic construct
  source 1..20: mol_type = other DNA
atggatagacgtactctgca

SEQ ID NO: 942 - DNA, 20 bp, synthetic construct
  source 1..20: mol_type = other DNA
gggtacgataaacttcttcc

SEQ ID NO: 943 - DNA, 20 bp, synthetic construct
  source 1..20: mol_type = other DNA
aatggatagacgtactctgc

SEQ ID NO: 944 - DNA, 20 bp, synthetic construct
  source 1..20: mol_type = other DNA
atgtacagctggccccacga

SEQ ID NO: 945 - DNA, 20 bp, synthetic construct
  source 1..20: mol_type = other DNA
agtgagatgggtatataggt

SEQ ID NO: 946 - DNA, 20 bp, synthetic construct
  source 1..20: mol_type = other DNA
ccagatagtgcagattgcta

SEQ ID NO: 947 - DNA, 20 bp, synthetic construct
  source 1..20: mol_type = other DNA
aggcaggattcgtgccatga

SEQ ID NO: 948 - DNA, 20 bp, synthetic construct
  source 1..20: mol_type = other DNA
tgaaacaggaggctctataa

SEQ ID NO: 949 - DNA, 20 bp, synthetic construct
  source 1..20: mol_type = other DNA
aagcctctaaaactagcatt

SEQ ID NO: 950 - DNA, 20 bp, synthetic construct
  source 1..20: mol_type = other DNA
ggtatagaatgtggattcac

SEQ ID NO: 951 - DNA, 20 bp, synthetic construct
  source 1..20: mol_type = other DNA
agcaggcttacgaattgcac

SEQ ID NO: 952 - DNA, 20 bp, synthetic construct
  source 1..20: mol_type = other DNA
agaaaagcatgggtacaaca

SEQ ID NO: 953 - DNA, 20 bp, synthetic construct
  source 1..20: mol_type = other DNA
tgttaacataatcctacctc

SEQ ID NO: 954 - DNA, 20 bp, synthetic construct
  source 1..20: mol_type = other DNA
gaacttccccctaccttgta

SEQ ID NO: 955 - DNA, 20 bp, synthetic construct
  source 1..20: mol_type = other DNA
gagcagcttctcgccgtaca

SEQ ID NO: 956 - DNA, 20 bp, synthetic construct
  source 1..20: mol_type = other DNA
gtggtgcccgacttcgaccc

SEQ ID NO: 957 - DNA, 20 bp, synthetic construct
  source 1..20: mol_type = other DNA
tctgggaaaggggtaaagtt

SEQ ID NO: 958 - DNA, 20 bp, synthetic construct
  source 1..20: mol_type = other DNA
ggtggcggtggcatgagggt

SEQ ID NO: 959 - DNA, 20 bp, synthetic construct
  source 1..20: mol_type = other DNA
gcttctcgccgtacaaggta

SEQ ID NO: 960 - DNA, 20 bp, synthetic construct
  source 1..20: mol_type = other DNA
ataaacaaaggcttacagca

SEQ ID NO: 961 - DNA, 20 bp, synthetic construct
  source 1..20: mol_type = other DNA
gttggatgtcctgtacagat

SEQ ID NO: 962 - DNA, 20 bp, synthetic construct
  source 1..20: mol_type = other DNA
actgctctgctcctctatgc

SEQ ID NO: 963 - DNA, 20 bp, synthetic construct
  source 1..20: mol_type = other DNA
aggcagagtcgtgctagcag

SEQ ID NO: 964 - DNA, 20 bp, synthetic construct
  source 1..20: mol_type = other DNA
ggaaaagagggttattacta

SEQ ID NO: 965 - DNA, 20 bp, synthetic construct
  source 1..20: mol_type = other DNA
tagaactgcaggttgttcat

SEQ ID NO: 966 - DNA, 20 bp, synthetic construct
  source 1..20: mol_type = other DNA
taatcctggcagtgcagact

SEQ ID NO: 967 - DNA, 20 bp, synthetic construct
  source 1..20: mol_type = other DNA
atttaggtagtggaggtata

SEQ ID NO: 968 - DNA, 20 bp, synthetic construct
  source 1..20: mol_type = other DNA
gcggtggtggatgagccaaa

SEQ ID NO: 969 - DNA, 20 bp, synthetic construct
  source 1..20: mol_type = other DNA
caagaacgaagtgtgtatgg

SEQ ID NO: 970 - DNA, 20 bp, synthetic construct
  source 1..20: mol_type = other DNA
gtggatgagccaaagggaca

SEQ ID NO: 971 - DNA, 20 bp, synthetic construct
  source 1..20: mol_type = other DNA
gcggagctcgcggtgccaca

SEQ ID NO: 972 - DNA, 20 bp, synthetic construct
  source 1..20: mol_type = other DNA
tggcaccgcgagctccgcaa

SEQ ID NO: 973 - DNA, 20 bp, synthetic construct
  source 1..20: mol_type = other DNA
tctgcaggacccctcttggt

SEQ ID NO: 974 - DNA, 20 bp, synthetic construct
  source 1..20: mol_type = other DNA
atccaccaccgcaagcacgc

SEQ ID NO: 975 - DNA, 20 bp, synthetic construct
  source 1..20: mol_type = other DNA
gacagtagcatcccctgatg

SEQ ID NO: 976 - DNA, 20 bp, synthetic construct
  source 1..20: mol_type = other DNA
aatggatcccaggtattggt

SEQ ID NO: 977 - DNA, 20 bp, synthetic construct
  source 1..20: mol_type = other DNA
aaggagaggcaatggatccc

SEQ ID NO: 978 - DNA, 20 bp, synthetic construct
  source 1..20: mol_type = other DNA
gccatctggaacatccccta

SEQ ID NO: 979 - DNA, 20 bp, synthetic construct
  source 1..20: mol_type = other DNA
gtattggtaggactgatcgt

SEQ ID NO: 980 - DNA, 20 bp, synthetic construct
  source 1..20: mol_type = other DNA
ttgttgcagcgccagtgcgt

SEQ ID NO: 981 - DNA, 20 bp, synthetic construct
  source 1..20: mol_type = other DNA
acagtgaccagagtgccatc

SEQ ID NO: 982 - DNA, 20 bp, synthetic construct
  source 1..20: mol_type = other DNA
gctccgtgctgcctacgcac

SEQ ID NO: 983 - DNA, 20 bp, synthetic construct
  source 1..20: mol_type = other DNA
ggtaggtggcgacttgcggt

SEQ ID NO: 984 - DNA, 20 bp, synthetic construct
  source 1..20: mol_type = other DNA
tggtacggtggtgactgtga

SEQ ID NO: 985 - DNA, 20 bp, synthetic construct
  source 1..20: mol_type = other DNA
acagtcaccaccgtaccatc

SEQ ID NO: 986 - DNA, 20 bp, synthetic construct
  source 1..20: mol_type = other DNA
tcggtggtaggtcgccactt

SEQ ID NO: 987 - DNA, 20 bp, synthetic construct
  source 1..20: mol_type = other DNA
tgggaagcggctctccgtga

SEQ ID NO: 988 - DNA, 20 bp, synthetic construct
  source 1..20: mol_type = other DNA
gtaggggaaggcagctgaca

SEQ ID NO: 989 - DNA, 20 bp, synthetic construct
  source 1..20: mol_type = other DNA
gacctaccaccgagccatca

SEQ ID NO: 990 - DNA, 20 bp, synthetic construct
  source 1..20: mol_type = other DNA
gcgagggcagcacggagcag

SEQ ID NO: 991 - DNA, 20 bp, synthetic construct
  source 1..20: mol_type = other DNA
gtggcgggaggtaggtatgg

SEQ ID NO: 992 - DNA, 20 bp, synthetic construct
  source 1..20: mol_type = other DNA
tagaagagtgtctacccaca

SEQ ID NO: 993 - DNA, 20 bp, synthetic construct
  source 1..20: mol_type = other DNA
ggatctatcgaggctctaca

SEQ ID NO: 994 - DNA, 20 bp, synthetic construct
  source 1..20: mol_type = other DNA
tgtactggtagccagagtta

SEQ ID NO: 995 - DNA, 20 bp, synthetic construct
  source 1..20: mol_type = other DNA
gcaagaagagaactaagact

SEQ ID NO: 996 - DNA, 20 bp, synthetic construct
  source 1..20: mol_type = other DNA
ccagcttatcaagactgagt

SEQ ID NO: 997 - DNA, 20 bp, synthetic construct
  source 1..20: mol_type = other DNA
aatcaggtctggctctatgc

SEQ ID NO: 998 - DNA, 20 bp, synthetic construct
  source 1..20: mol_type = other DNA
ctattcaagacacagaacaa

SEQ ID NO: 999 - DNA, 20 bp, synthetic construct
  source 1..20: mol_type = other DNA
agactgagtgggaaggcacg

SEQ ID NO: 1000 - DNA, 20 bp, synthetic construct
  source 1..20: mol_type = other DNA
gctgacggccatccacaagt

SEQ ID NO: 1001 - DNA, 20 bp, synthetic construct
  source 1..20: mol_type = other DNA
tcaccttgcggcccatgatg

SEQ ID NO: 1002 - DNA, 20 bp, synthetic construct
  source 1..20: mol_type = other DNA
tgtgctgtacctgaagaatg

SEQ ID NO: 1003 - DNA, 20 bp, synthetic construct
  source 1..20: mol_type = other DNA
ggatggccgtcagcaagtac

SEQ ID NO: 1004 - DNA, 20 bp, synthetic construct
  source 1..20: mol_type = other DNA
gacagtcagccccattcttc

SEQ ID NO: 1005 - DNA, 20 bp, synthetic construct
  source 1..20: mol_type = other DNA
agccaccacttcctcatcat

SEQ ID NO: 1006 - DNA, 20 bp, synthetic construct
  source 1..20: mol_type = other DNA
agtactggctcttcaccttg

SEQ ID NO: 1007 - DNA, 20 bp, synthetic construct
  source 1..20: mol_type = other DNA
ggctgaggttgtccagctgg

SEQ ID NO: 1008 - DNA, 20 bp, synthetic construct
  source 1..20: mol_type = other DNA
aagccatctacagtgagtga

SEQ ID NO: 1009 - DNA, 20 bp, synthetic construct
  source 1..20: mol_type = other DNA
agagagttgagacaccaggt

SEQ ID NO: 1010 - DNA, 20 bp, synthetic construct
  source 1..20: mol_type = other DNA
ggagtgcgcttatactacat

SEQ ID NO: 1011 - DNA, 20 bp, synthetic construct
  source 1..20: mol_type = other DNA
acagtgtgtaaaattccacc

SEQ ID NO: 1012 - DNA, 20 bp, synthetic construct
  source 1..20: mol_type = other DNA
gaaatgacaagaaggcatat

SEQ ID NO: 1013 - DNA, 20 bp, synthetic construct
  source 1..20: mol_type = other DNA
attgtaatcagagatatggc

SEQ ID NO: 1014 - DNA, 20 bp, synthetic construct
  source 1..20: mol_type = other DNA
tgagtgagggctgtgatgca

SEQ ID NO: 1015 - DNA, 20 bp, synthetic construct
  source 1..20: mol_type = other DNA
attattgaatccatacctgg

SEQ ID NO: 1016 - DNA, 20 bp, synthetic construct
  source 1..20: mol_type = other DNA
cttgtaagacaccttcacca

SEQ ID NO: 1017 - DNA, 20 bp, synthetic construct
  source 1..20: mol_type = other DNA
gctgactgatggctccgaga

SEQ ID NO: 1018 - DNA, 20 bp, synthetic construct
  source 1..20: mol_type = other DNA
gaggtacgtgatgagcgcga

SEQ ID NO: 1019 - DNA, 20 bp, synthetic construct
  source 1..20: mol_type = other DNA
ggagcgcatgcggaggctca

SEQ ID NO: 1020 - DNA, 20 bp, synthetic construct
  source 1..20: mol_type = other DNA
ttgagcagcgcccagagctc

SEQ ID NO: 1021 - DNA, 20 bp, synthetic construct
  source 1..20: mol_type = other DNA
agacaagcacatcctcgcca

SEQ ID NO: 1022 - DNA, 20 bp, synthetic construct
  source 1..20: mol_type = other DNA
agtgctctaccgccacatgc

SEQ ID NO: 1023 - DNA, 20 bp, synthetic construct
  source 1..20: mol_type = other DNA
gctcggcctgaacctccagt

SEQ ID NO: 1024 - DNA, 20 bp, synthetic construct
  source 1..20: mol_type = other DNA
acaagagatacccctcactc

SEQ ID NO: 1025 - DNA, 20 bp, synthetic construct
  source 1..20: mol_type = other DNA
gcagatcgagtcctacccca

SEQ ID NO: 1026 - DNA, 20 bp, synthetic construct
  source 1..20: mol_type = other DNA
tccccggatgctgtatgcga

SEQ ID NO: 1027 - DNA, 20 bp, synthetic construct
  source 1..20: mol_type = other DNA
atctcttgtacagagaacct

SEQ ID NO: 1028 - DNA, 20 bp, synthetic construct
  source 1..20: mol_type = other DNA
tgagtgggacatgtcagaga

SEQ ID NO: 1029 - DNA, 20 bp, synthetic construct
  source 1..20: mol_type = other DNA
aagttccagctggaggacga

SEQ ID NO: 1030 - DNA, 20 bp, synthetic construct
  source 1..20: mol_type = other DNA
ctagtcgcctccagagtgag

SEQ ID NO: 1031 - DNA, 20 bp, synthetic construct
  source 1..20: mol_type = other DNA
cctcagctgaacatccatgt

SEQ ID NO: 1032 - DNA, 20 bp, synthetic construct
  source 1..20: mol_type = other DNA
gctgctggagcactacgtgg

SEQ ID NO: 1033 - DNA, 20 bp, synthetic construct
  source 1..20: mol_type = other DNA
gggcccccagtagaatccgc

SEQ ID NO: 1034 - DNA, 20 bp, synthetic construct
  source 1..20: mol_type = other DNA
tcaggccggccgctttcacc

SEQ ID NO: 1035 - DNA, 20 bp, synthetic construct
  source 1..20: mol_type = other DNA
taggatggtagcacacaacc

SEQ ID NO: 1036 - DNA, 20 bp, synthetic construct
  source 1..20: mol_type = other DNA
gcggctgtcgcgcaccagga

SEQ ID NO: 1037 - DNA, 20 bp, synthetic construct
  source 1..20: mol_type = other DNA
ggacgcctgcggattctact

SEQ ID NO: 1038 - DNA, 20 bp, synthetic construct
  source 1..20: mol_type = other DNA
tggcggcacagctcctgcag

SEQ ID NO: 1039 - DNA, 20 bp, synthetic construct
  source 1..20: mol_type = other DNA
cgagctgctggagcactacg

SEQ ID NO: 1040 - DNA, 20 bp, synthetic construct
  source 1..20: mol_type = other DNA
gagattatgaaacaccaaag

SEQ ID NO: 1041 - DNA, 20 bp, synthetic construct
  source 1..20: mol_type = other DNA
gggacgttgcagctctcaga

SEQ ID NO: 1042 - DNA, 20 bp, synthetic construct
  source 1..20: mol_type = other DNA
actgctggtcaatctctccc

SEQ ID NO: 1043 - DNA, 20 bp, synthetic construct
  source 1..20: mol_type = other DNA
aagtggccgaggtcctgagc

SEQ ID NO: 1044 - DNA, 20 bp, synthetic construct
  source 1..20: mol_type = other DNA
agccgatctaggcagatgtt

SEQ ID NO: 1045 - DNA, 20 bp, synthetic construct
  source 1..20: mol_type = other DNA
gagaccgaggtgtatcacca

SEQ ID NO: 1046 - DNA, 20 bp, synthetic construct
  source 1..20: mol_type = other DNA
ctacagtgacagcttcccaa

SEQ ID NO: 1047 - DNA, 20 bp, synthetic construct
  source 1..20: mol_type = other DNA
gaaagtggtagagaatctcc

SEQ ID NO: 1048 - DNA, 20 bp, synthetic construct
  source 1..20: mol_type = other DNA
tctgagtcttcagtacctgg

SEQ ID NO: 1049 - DNA, 20 bp, synthetic construct
  source 1..20: mol_type = other DNA
gccatggacgatgaccacca

SEQ ID NO: 1050 - DNA, 20 bp, synthetic construct
  source 1..20: mol_type = other DNA
aaggtcataagaaggcacca

SEQ ID NO: 1051 - DNA, 20 bp, synthetic construct
  source 1..20: mol_type = other DNA
tctgtagagcatatatcaga

SEQ ID NO: 1052 - DNA, 20 bp, synthetic construct
  source 1..20: mol_type = other DNA
tgagtcttcagtacctgggg

SEQ ID NO: 1053 - DNA, 20 bp, synthetic construct
  source 1..20: mol_type = other DNA
acatcagcacccttgaggtg

SEQ ID NO: 1054 - DNA, 20 bp, synthetic construct
  source 1..20: mol_type = other DNA
agagctccagatgcctacca

SEQ ID NO: 1055 - DNA, 20 bp, synthetic construct
  source 1..20: mol_type = other DNA
gaagactcagaccaagttcc

SEQ ID NO: 1056 - DNA, 20 bp, synthetic construct
  source 1..20: mol_type = other DNA
acctacctgagtaagctcat

SEQ ID NO: 1057 - DNA, 20 bp, synthetic construct
  source 1..20: mol_type = other DNA
agatggttcctccatatggt

SEQ ID NO: 1058 - DNA, 20 bp, synthetic construct
  source 1..20: mol_type = other DNA
aagagagaccacctaccata

SEQ ID NO: 1059 - DNA, 20 bp, synthetic construct
  source 1..20: mol_type = other DNA
aagagtatatatgaccccat

SEQ ID NO: 1060 - DNA, 20 bp, synthetic construct
  source 1..20: mol_type = other DNA
ataggtaactgatacacttc

SEQ ID NO: 1061 - DNA, 20 bp, synthetic construct
  source 1..20: mol_type = other DNA
aaagagtatatatgacccca

SEQ ID NO: 1062 - DNA, 20 bp, synthetic construct
  source 1..20: mol_type = other DNA
tatcagatggttcctccata

SEQ ID NO: 1063 - DNA, 20 bp, synthetic construct
  source 1..20: mol_type = other DNA
agagaccacctaccatatgg

SEQ ID NO: 1064 - DNA, 20 bp, synthetic construct
  source 1..20: mol_type = other DNA
atgctaggagatcactaaca

SEQ ID NO: 1065 - DNA, 20 bp, synthetic construct
  source 1..20: mol_type = other DNA
agtatcaccttgctaacata

SEQ ID NO: 1066 - DNA, 20 bp, synthetic construct
  source 1..20: mol_type = other DNA
ttagtgatctcctagcatca

SEQ ID NO: 1067 - DNA, 20 bp, synthetic construct
  source 1..20: mol_type = other DNA
aggtatggatgcatatccct

SEQ ID NO: 1068 - DNA, 20 bp, synthetic construct
  source 1..20: mol_type = other DNA
ggttatgggatgtagaccga

SEQ ID NO: 1069 - DNA, 20 bp, synthetic construct
  source 1..20: mol_type = other DNA
gatgctaggagatcactaac

SEQ ID NO: 1070 - DNA, 20 bp, synthetic construct
  source 1..20: mol_type = other DNA
tattctggcaaacccatcat

SEQ ID NO: 1071 - DNA, 20 bp, synthetic construct
  source 1..20: mol_type = other DNA
taacctaacagtagaatcaa

SEQ ID NO: 1072 - DNA, 20 bp, synthetic construct
  source 1..20: mol_type = other DNA
ctgcacatgcagctataccc

SEQ ID NO: 1073 - DNA, 20 bp, synthetic construct
  source 1..20: mol_type = other DNA
gcaggccaagtactatgagc

SEQ ID NO: 1074 - DNA, 20 bp, synthetic construct
  source 1..20: mol_type = other DNA
tacagcatgaaggcattgag

SEQ ID NO: 1075 - DNA, 20 bp, synthetic construct
  source 1..20: mol_type = other DNA
gtacagcatgaaggcattga

SEQ ID NO: 1076 - DNA, 20 bp, synthetic construct
  source 1..20: mol_type = other DNA
atacccaggctggtcagcgc

SEQ ID NO: 1077 - DNA, 20 bp, synthetic construct
  source 1..20: mol_type = other DNA
acatgcagctatacccaggc

SEQ ID NO: 1078 - DNA, 20 bp, synthetic construct
  source 1..20: mol_type = other DNA
atgagctggcccgcaaggag

SEQ ID NO: 1079 - DNA, 20 bp, synthetic construct
  source 1..20: mol_type = other DNA
tacaccagaacctagcatca

SEQ ID NO: 1080 - DNA, 20 bp, synthetic construct
  source 1..20: mol_type = other DNA
catgttgtgcaagtctctgt

SEQ ID NO: 1081 - DNA, 20 bp, synthetic construct
  source 1..20: mol_type = other DNA
tataggagtatctagtaatt

SEQ ID NO: 1082 - DNA, 20 bp, synthetic construct
  source 1..20: mol_type = other DNA
agaataggaacccagatatg

SEQ ID NO: 1083 - DNA, 20 bp, synthetic construct
  source 1..20: mol_type = other DNA
ggagtatctagtaatttgga

SEQ ID NO: 1084 - DNA, 20 bp, synthetic construct
  source 1..20: mol_type = other DNA
aatcccatgaacccttaccc

SEQ ID NO: 1085 - DNA, 20 bp, synthetic construct
  source 1..20: mol_type = other DNA
gtagactgagcttagacaga

SEQ ID NO: 1086 - DNA, 20 bp, synthetic construct
  source 1..20: mol_type = other DNA
tcatggagcatgtactacaa

SEQ ID NO: 1087 - DNA, 20 bp, synthetic construct
  source 1..20: mol_type = other DNA
catgcagaatggcagcacat

SEQ ID NO: 1088 - DNA, 20 bp, synthetic construct
  source 1..20: mol_type = other DNA
gaaggtacaagatcataata

SEQ ID NO: 1089 - DNA, 20 bp, synthetic construct
  source 1..20: mol_type = other DNA
attgctccaaaccacagagt

SEQ ID NO: 1090 - DNA, 20 bp, synthetic construct
  source 1..20: mol_type = other DNA
actgcttatagaattacctt

SEQ ID NO: 1091 - DNA, 20 bp, synthetic construct
  source 1..20: mol_type = other DNA
tgtctgctgctataaatccc

SEQ ID NO: 1092 - DNA, 20 bp, synthetic construct
  source 1..20: mol_type = other DNA
ggaatcatcgagaacttcag

SEQ ID NO: 1093 - DNA, 20 bp, synthetic construct
  source 1..20: mol_type = other DNA
gtggtttggagcaatatcaa

SEQ ID NO: 1094 - DNA, 20 bp, synthetic construct
  source 1..20: mol_type = other DNA
gagatgcagacgaagcacac

SEQ ID NO: 1095 - DNA, 20 bp, synthetic construct
  source 1..20: mol_type = other DNA
acgtgctgacatctatgcaa

SEQ ID NO: 1096 - DNA, 20 bp, synthetic construct
  source 1..20: mol_type = other DNA
gcagaccgatgtctactcca

SEQ ID NO: 1097 - DNA, 20 bp, synthetic construct
  source 1..20: mol_type = other DNA
tggatgacctggctaacagt

SEQ ID NO: 1098 - DNA, 20 bp, synthetic construct
  source 1..20: mol_type = other DNA
acagtgatcacactccatgt

SEQ ID NO: 1099 - DNA, 20 bp, synthetic construct
  source 1..20: mol_type = other DNA
tgtggaggtgagcaatcccc

SEQ ID NO: 1100 - DNA, 20 bp, synthetic construct
  source 1..20: mol_type = other DNA
aaagcgacctttccccacca

SEQ ID NO: 1101 - DNA, 20 bp, synthetic construct
  source 1..20: mol_type = other DNA
cagagccatggagtagacat

SEQ ID NO: 1102 - DNA, 20 bp, synthetic construct
  source 1..20: mol_type = other DNA
gaacatactccagttcctga

SEQ ID NO: 1103 - DNA, 20 bp, synthetic construct
  source 1..20: mol_type = other DNA
gtggaggtgagcaatccccc

SEQ ID NO: 1104 - DNA, 20 bp, synthetic construct
  source 1..20: mol_type = other DNA
tcccagtgtacgtcccatca

SEQ ID NO: 1105 - DNA, 20 bp, synthetic construct
  source 1..20: mol_type = other DNA
agtgtacgtcccatcagggt

SEQ ID NO: 1106 - DNA, 20 bp, synthetic construct
  source 1..20: mol_type = other DNA
gctgaccgtgaacgatacag

SEQ ID NO: 1107 - DNA, 20 bp, synthetic construct
  source 1..20: mol_type = other DNA
gttcacggtcagcgactgga

SEQ ID NO: 1108 - DNA, 20 bp, synthetic construct
  source 1..20: mol_type = other DNA
tgtgcctgtcatcattccta

SEQ ID NO: 1109 - DNA, 20 bp, synthetic construct
  source 1..20: mol_type = other DNA
tctatcacacctaccctgat

SEQ ID NO: 1110 - DNA, 20 bp, synthetic construct
  source 1..20: mol_type = other DNA
aagcaatggaatctggaacc

SEQ ID NO: 1111 - DNA, 20 bp, synthetic construct
  source 1..20: mol_type = other DNA
ctggaggtcctagaaagctc

SEQ ID NO: 1112 - DNA, 20 bp, synthetic construct
  source 1..20: mol_type = other DNA
tgaggagtacaagcaccgca

SEQ ID NO: 1113 - DNA, 20 bp, synthetic construct
  source 1..20: mol_type = other DNA
tgtcacagcagagattgtgc

SEQ ID NO: 1114 - DNA, 20 bp, synthetic construct
  source 1..20: mol_type = other DNA
gagcgtcaccatattccagt

SEQ ID NO: 1115 - DNA, 20 bp, synthetic construct
  source 1..20: mol_type = other DNA
tggatgtgcagatgcccatg

SEQ ID NO: 1116 - DNA, 20 bp, synthetic construct
  source 1..20: mol_type = other DNA
gcggtgcttgtactcctcag

SEQ ID NO: 1117 - DNA, 20 bp, synthetic construct
  source 1..20: mol_type = other DNA
gagtcgcttcccctactgcg

SEQ ID NO: 1118 - DNA, 20 bp, synthetic construct
  source 1..20: mol_type = other DNA
gaagagactcacgtgagcac

SEQ ID NO: 1119 - DNA, 20 bp, synthetic construct
  source 1..20: mol_type = other DNA
aagagactcacgtgagcacc

SEQ ID NO: 1120 - DNA, 20 bp, synthetic construct
  source 1..20: mol_type = other DNA
tatgccatgagtgctcagag

SEQ ID NO: 1121 - DNA, 20 bp, synthetic construct
  source 1..20: mol_type = other DNA
taaatgtcctggtaacatcc

SEQ ID NO: 1122 - DNA, 20 bp, synthetic construct
  source 1..20: mol_type = other DNA
gccacttctcagtacatgtg

SEQ ID NO: 1123 - DNA, 20 bp, synthetic construct
  source 1..20: mol_type = other DNA
tgtcatagccgagaacaatg

SEQ ID NO: 1124 - DNA, 20 bp, synthetic construct
  source 1..20: mol_type = other DNA
gtgatagaaatccccgtcca

SEQ ID NO: 1125 - DNA, 20 bp, synthetic construct
  source 1..20: mol_type = other DNA
gccatgaagtgcaggagccc

SEQ ID NO: 1126 - DNA, 20 bp, synthetic construct
  source 1..20: mol_type = other DNA
accaggcccactgtccttca

SEQ ID NO: 1127 - DNA, 20 bp, synthetic construct
  source 1..20: mol_type = other DNA
gggcgttcaggacacagact

SEQ ID NO: 1128 - DNA, 20 bp, synthetic construct
  source 1..20: mol_type = other DNA
ccaggcctaggcttaaacac

SEQ ID NO: 1129 - DNA, 20 bp, synthetic construct
  source 1..20: mol_type = other DNA
gaagcagaagaatccaagga

SEQ ID NO: 1130 - DNA, 20 bp, synthetic construct
  source 1..20: mol_type = other DNA
atatgccagtgtttaagcct

SEQ ID NO: 1131 - DNA, 20 bp, synthetic construct
  source 1..20: mol_type = other DNA
ctccgaagcagaagaatcca

SEQ ID NO: 1132 - DNA, 20 bp, synthetic construct
  source 1..20: mol_type = other DNA
gctttctgatacccaggcct

SEQ ID NO: 1133 - DNA, 20 bp, synthetic construct
  source 1..20: mol_type = other DNA
tactcaatctctgagtcgag

SEQ ID NO: 1134 - DNA, 20 bp, synthetic construct
  source 1..20: mol_type = other DNA
cagtgtttaagcctaggcct

SEQ ID NO: 1135 - DNA, 20 bp, synthetic construct
  source 1..20: mol_type = other DNA
ggcttaaacactggcatata

SEQ ID NO: 1136 - DNA, 20 bp, synthetic construct
  source 1..20: mol_type = other DNA
ccgaggcacagtcgatacac

SEQ ID NO: 1137 - DNA, 20 bp, synthetic construct
  source 1..20: mol_type = other DNA
taccctgggactgtaccccc

SEQ ID NO: 1138 - DNA, 20 bp, synthetic construct
  source 1..20: mol_type = other DNA
accaggctgtgacagacctc

SEQ ID NO: 1139 - DNA, 20 bp, synthetic construct
  source 1..20: mol_type = other DNA
acaacgctgtgtgcgtccca

SEQ ID NO: 1140 - DNA, 20 bp, synthetic construct
  source 1..20: mol_type = other DNA
tcccaagcaggaggcgccca

SEQ ID NO: 1141 - DNA, 20 bp, synthetic construct
  source 1..20: mol_type = other DNA
ggccacggccaggaggacga

SEQ ID NO: 1142 - DNA, 20 bp, synthetic construct
  source 1..20: mol_type = other DNA
cagcagcgccaggccgcaca

SEQ ID NO: 1143 - DNA, 20 bp, synthetic construct
  source 1..20: mol_type = other DNA
cgaggtcaggaggaggacgc

SEQ ID NO: 1144 - DNA, 20 bp, synthetic construct
  source 1..20: mol_type = other DNA
gacatatgcaggcagtgtaa

SEQ ID NO: 1145 - DNA, 20 bp, synthetic construct
  source 1..20: mol_type = other DNA
acatgctgcatcctgccccc

SEQ ID NO: 1146 - DNA, 20 bp, synthetic construct
  source 1..20: mol_type = other DNA
tgtgaatgggacgaaggaga

SEQ ID NO: 1147 - DNA, 20 bp, synthetic construct
  source 1..20: mol_type = other DNA
aaaggacctgtgacatatgc

SEQ ID NO: 1148 - DNA, 20 bp, synthetic construct
  source 1..20: mol_type = other DNA
gcgctggagaaactatttgg

SEQ ID NO: 1149 - DNA, 20 bp, synthetic construct
  source 1..20: mol_type = other DNA
aattatacgtactttgtcca

SEQ ID NO: 1150 - DNA, 20 bp, synthetic construct
  source 1..20: mol_type = other DNA
aacgtggcatctgtcgaccc

SEQ ID NO: 1151 - DNA, 20 bp, synthetic construct
  source 1..20: mol_type = other DNA
ccagctgggcagttactaca

SEQ ID NO: 1152 - DNA, 20 bp, synthetic construct
  source 1..20: mol_type = other DNA
gcagaagcaggtgactgacc

SEQ ID NO: 1153 - DNA, 20 bp, synthetic construct
  source 1..20: mol_type = other DNA
tgtgcaccttggatgccagt

SEQ ID NO: 1154 - DNA, 20 bp, synthetic construct
  source 1..20: mol_type = other DNA
ccaggtgaagatcttcgagg

SEQ ID NO: 1155 - DNA, 20 bp, synthetic construct
  source 1..20: mol_type = other DNA
actcacgctgtcgggtgagt

SEQ ID NO: 1156 - DNA, 20 bp, synthetic construct
  source 1..20: mol_type = other DNA
tgagcgcatgaatgaggaga

SEQ ID NO: 1157 - DNA, 20 bp, synthetic construct
  source 1..20: mol_type = other DNA
cttcgaggaggacttccaga

SEQ ID NO: 1158 - DNA, 20 bp, synthetic construct
  source 1..20: mol_type = other DNA
gctggaagtgaacaagcagt

SEQ ID NO: 1159 - DNA, 20 bp, synthetic construct
  source 1..20: mol_type = other DNA
tgtgccgaggagccggacca

SEQ ID NO: 1160 - DNA, 20 bp, synthetic construct
  source 1..20: mol_type = other DNA
atagtgggaacttaggtaca

SEQ ID NO: 1161 - DNA, 20 bp, synthetic construct
  source 1..20: mol_type = other DNA
aataacgcataggcagacac

SEQ ID NO: 1162 - DNA, 20 bp, synthetic construct
  source 1..20: mol_type = other DNA
cagggagaaggtcccagaca

SEQ ID NO: 1163 - DNA, 20 bp, synthetic construct
  source 1..20: mol_type = other DNA
agggaaggaggagtaattgg

SEQ ID NO: 1164 - DNA, 20 bp, synthetic construct
  source 1..20: mol_type = other DNA
ggtctataaaaagaaaaccg

SEQ ID NO: 1165 - DNA, 20 bp, synthetic construct
  source 1..20: mol_type = other DNA
gatactcaggccgccatcaa

SEQ ID NO: 1166 - DNA, 20 bp, synthetic construct
  source 1..20: mol_type = other DNA
gttggtgatagtgggaactt

SEQ ID NO: 1167 - DNA, 20 bp, synthetic construct
  source 1..20: mol_type = other DNA
tgatactcaggccgccatca

SEQ ID NO: 1168 - DNA, 20 bp, synthetic construct
  source 1..20: mol_type = other DNA
attcgccatgaccttcgcca

SEQ ID NO: 1169 - DNA, 20 bp, synthetic construct
  source 1..20: mol_type = other DNA
gtactggaatagggctctca

SEQ ID NO: 1170 - DNA, 20 bp, synthetic construct
  source 1..20: mol_type = other DNA
cagcaggacgaagccagcga

SEQ ID NO: 1171 - DNA, 20 bp, synthetic construct
  source 1..20: mol_type = other DNA
gatgagctgacgctaagtcc

SEQ ID NO: 1172 - DNA, 20 bp, synthetic construct
  source 1..20: mol_type = other DNA
agtggatcagatcttcggga

SEQ ID NO: 1173 - DNA, 20 bp, synthetic construct
  source 1..20: mol_type = other DNA
cctagacgaccccatccccc

SEQ ID NO: 1174 - DNA, 20 bp, synthetic construct
  source 1..20: mol_type = other DNA
agtcacagagtgtcacgtgt

SEQ ID NO: 1175 - DNA, 20 bp, synthetic construct
  source 1..20: mol_type = other DNA
ggatggggtcgtctagggaa

SEQ ID NO: 1176 - DNA, 20 bp, synthetic construct
  source 1..20: mol_type = other DNA
gcagcggtagccctgataga

SEQ ID NO: 1177 - DNA, 20 bp, synthetic construct
  source 1..20: mol_type = other DNA
agacattgtggagctcacga

SEQ ID NO: 1178 - DNA, 20 bp, synthetic construct
  source 1..20: mol_type = other DNA
gctctctgagaacattcctg

SEQ ID NO: 1179 - DNA, 20 bp, synthetic construct
  source 1..20: mol_type = other DNA
gggtccaggacagagcagac

SEQ ID NO: 1180 - DNA, 20 bp, synthetic construct
  source 1..20: mol_type = other DNA
gaggcactcacatggacata

SEQ ID NO: 1181 - DNA, 20 bp, synthetic construct
  source 1..20: mol_type = other DNA
aggagaccgagacaacaaga

SEQ ID NO: 1182 - DNA, 20 bp, synthetic construct
  source 1..20: mol_type = other DNA
tgagctccacaatgtctcca

SEQ ID NO: 1183 - DNA, 20 bp, synthetic construct
  source 1..20: mol_type = other DNA
ggtccaggacagagcagaca

SEQ ID NO: 1184 - DNA, 20 bp, synthetic construct
  source 1..20: mol_type = other DNA
atgcggcggcccgtgccagg

SEQ ID NO: 1185 - DNA, 20 bp, synthetic construct
  source 1..20: mol_type = other DNA
caggtcgctctacgaagatc

SEQ ID NO: 1186 - DNA, 20 bp, synthetic construct
  source 1..20: mol_type = other DNA
acaggagactggacatcgtc

SEQ ID NO: 1187 - DNA, 20 bp, synthetic construct
  source 1..20: mol_type = other DNA
ctaggctccggacaacctgg

SEQ ID NO: 1188 - DNA, 20 bp, synthetic construct
  source 1..20: mol_type = other DNA
tctgaaagagcgatgcctcc

SEQ ID NO: 1189 - DNA, 20 bp, synthetic construct
  source 1..20: mol_type = other DNA
gcgattgcagaagatgacct

SEQ ID NO: 1190 - DNA, 20 bp, synthetic construct
  source 1..20: mol_type = other DNA
tgactaggctccggacaacc

SEQ ID NO: 1191 - DNA, 20 bp, synthetic construct
  source 1..20: mol_type = other DNA
cgctctttcagagtatacac

SEQ ID NO: 1192 - DNA, 20 bp, synthetic construct
  source 1..20: mol_type = other DNA
gatcaccagcaagattgcga

SEQ ID NO: 1193 - DNA, 20 bp, synthetic construct
  source 1..20: mol_type = other DNA
aaagctccaggattctgaca

SEQ ID NO: 1194 - DNA, 20 bp, synthetic construct
  source 1..20: mol_type = other DNA
agtacggaatgagctcctgg

SEQ ID NO: 1195 - DNA, 20 bp, synthetic construct
  source 1..20: mol_type = other DNA
aggaattcccatcatccccc

SEQ ID NO: 1196 - DNA, 20 bp, synthetic construct
  source 1..20: mol_type = other DNA
agaggctggaaaggtcatct

SEQ ID NO: 1197 - DNA, 20 bp, synthetic construct
  source 1..20: mol_type = other DNA
attccgtacttcgtcactgt

SEQ ID NO: 1198 - DNA, 20 bp, synthetic construct
  source 1..20: mol_type = other DNA
aaggtcatctcggagactag

SEQ ID NO: 1199 - DNA, 20 bp, synthetic construct
  source 1..20: mol_type = other DNA
tcatctcggagactagaggc

SEQ ID NO: 1200 - DNA, 20 bp, synthetic construct
  source 1..20: mol_type = other DNA
gcagccgtgtccctatggta

SEQ ID NO: 1201 - DNA, 20 bp, synthetic construct
  source 1..20: mol_type = other DNA
aggctgggttccataccata

SEQ ID NO: 1202 - DNA, 20 bp, synthetic construct
  source 1..20: mol_type = other DNA
tcactgccagcaggatgccc

SEQ ID NO: 1203 - DNA, 20 bp, synthetic construct
  source 1..20: mol_type = other DNA
gaagctgggctattcatcca

SEQ ID NO: 1204 - DNA, 20 bp, synthetic construct
  source 1..20: mol_type = other DNA
aggaagcagccgtgtcccta

SEQ ID NO: 1205 - DNA, 20 bp, synthetic construct
  source 1..20: mol_type = other DNA
tgggtgagctggtgaaacac

SEQ ID NO: 1206 - DNA, 20 bp, synthetic construct
  source 1..20: mol_type = other DNA
gacacataccgtgacctcca

SEQ ID NO: 1207 - DNA, 20 bp, synthetic construct
  source 1..20: mol_type = other DNA
tggatgaatagcccagcttc

SEQ ID NO: 1208 - DNA, 20 bp, synthetic construct
  source 1..20: mol_type = other DNA
gacaagtgccagttcgcaca

SEQ ID NO: 1209 - DNA, 20 bp, synthetic construct
  source 1..20: mol_type = other DNA
caactccagccgctacaaga

SEQ ID NO: 1210 - DNA, 20 bp, synthetic construct
  source 1..20: mol_type = other DNA
tgccgcaccttccacaccat

SEQ ID NO: 1211 - DNA, 20 bp, synthetic construct
  source 1..20: mol_type = other DNA
aaacggtgcctgtaagtacg

SEQ ID NO: 1212 - DNA, 20 bp, synthetic construct
  source 1..20: mol_type = other DNA
aggggcaaaagccgatggtg

SEQ ID NO: 1213 - DNA, 20 bp, synthetic construct
  source 1..20: mol_type = other DNA
gctccgtcttgtacttgggg

SEQ ID NO: 1214 - DNA, 20 bp, synthetic construct
  source 1..20: mol_type = other DNA
gttgtggatgaagtggcagc

SEQ ID NO: 1215 - DNA, 20 bp, synthetic construct
  source 1..20: mol_type = other DNA
gcacttgtccccgtacttac

SEQ ID NO: 1216 - DNA, 20 bp, synthetic construct
  source 1..20: mol_type = other DNA
ggggagtttcagcccaacga

SEQ ID NO: 1217 - DNA, 20 bp, synthetic construct
  source 1..20: mol_type = other DNA
ttacggttcgatcaatctca

SEQ ID NO: 1218 - DNA, 20 bp, synthetic construct
  source 1..20: mol_type = other DNA
gcaggacagacgacccgcgt

SEQ ID NO: 1219 - DNA, 20 bp, synthetic construct
  source 1..20: mol_type = other DNA
tgggacctagagttctacga

SEQ ID NO: 1220 - DNA, 20 bp, synthetic construct
  source 1..20: mol_type = other DNA
gcttcggccagactatactg

SEQ ID NO: 1221 - DNA, 20 bp, synthetic construct
  source 1..20: mol_type = other DNA
aaaaaaccaaatcgccacgt

SEQ ID NO: 1222 - DNA, 20 bp, synthetic construct
  source 1..20: mol_type = other DNA
agagaaggcctttcaatcga

SEQ ID NO: 1223 - DNA, 20 bp, synthetic construct
  source 1..20: mol_type = other DNA
gttctaccttcagtccgatg

SEQ ID NO: 1224 - DNA, 20 bp, synthetic construct
  source 1..20: mol_type = other DNA
ttctttgtaaggcgccacac

SEQ ID NO: 1225 - DNA, 20 bp, synthetic construct
  source 1..20: mol_type = other DNA
gagtggacgatcagtctaag

SEQ ID NO: 1226 - DNA, 20 bp, synthetic construct
  source 1..20: mol_type = other DNA
atagacagttcaatctgtgc

SEQ ID NO: 1227 - DNA, 20 bp, synthetic construct
  source 1..20: mol_type = other DNA
tttgcgttagagatcgggaa

SEQ ID NO: 1228 - DNA, 20 bp, synthetic construct
  source 1..20: mol_type = other DNA
gcccgagtctacagattcgt

SEQ ID NO: 1229 - DNA, 20 bp, synthetic construct
  source 1..20: mol_type = other DNA
attatacccacgacgagctg

SEQ ID NO: 1230 - DNA, 20 bp, synthetic construct
  source 1..20: mol_type = other DNA
tttcggaccacggtcgacca

SEQ ID NO: 1231 - DNA, 20 bp, synthetic construct
  source 1..20: mol_type = other DNA
accgtccgtttcgcaatgtg

SEQ ID NO: 1232 - DNA, 20 bp, synthetic construct
  source 1..20: mol_type = other DNA
agagaaaccacgcacggcaa

SEQ ID NO: 1233 - DNA, 20 bp, synthetic construct
  source 1..20: mol_type = other DNA
ctccgattctcggcaatgtg

SEQ ID NO: 1234 - DNA, 20 bp, synthetic construct
  source 1..20: mol_type = other DNA
gtttatggagactatcaacg

SEQ ID NO: 1235 - DNA, 20 bp, synthetic construct
  source 1..20: mol_type = other DNA
tgatagagtcaaattgacgg

SEQ ID NO: 1236 - DNA, 20 bp, synthetic construct
  source 1..20: mol_type = other DNA
tatatgacgtcctcacgccg

SEQ ID NO: 1237 - DNA, 20 bp, synthetic construct
  source 1..20: mol_type = other DNA
tggtccattccattgcgact

SEQ ID NO: 1238 - DNA, 20 bp, synthetic construct
  source 1..20: mol_type = other DNA
caacaatctttacgttgcca

SEQ ID NO: 1239 - DNA, 20 bp, synthetic construct
  source 1..20: mol_type = other DNA
ggaccatggacacttaagac

SEQ ID NO: 1240 - DNA, 20 bp, synthetic construct
  source 1..20: mol_type = other DNA
cacaattcccttagcgacgt

SEQ ID NO: 1241 - DNA, 20 bp, synthetic construct
  source 1..20: mol_type = other DNA
aagggcgcaacactaccatt

SEQ ID NO: 1242 - DNA, 20 bp, synthetic construct
  source 1..20: mol_type = other DNA
tatatagtgtcatcgaaccc

SEQ ID NO: 1243 - DNA, 20 bp, synthetic construct
  source 1..20: mol_type = other DNA
ccagatccaacgtctaacct

SEQ ID NO: 1244 - DNA, 20 bp, synthetic construct
  source 1..20: mol_type = other DNA
tagactagaccgtactgaag

SEQ ID NO: 1245 - DNA, 20 bp, synthetic construct
  source 1..20: mol_type = other DNA
actaacggcgcatcacctaa

SEQ ID NO: 1246 - DNA, 20 bp, synthetic construct
  source 1..20: mol_type = other DNA
cggctggtaaaaagtcgcga

SEQ ID NO: 1247 - DNA, 20 bp, synthetic construct
  source 1..20: mol_type = other DNA
tttcgtaatccatgttacca

SEQ ID NO: 1248 - DNA, 20 bp, synthetic construct
  source 1..20: mol_type = other DNA
taccgatagccaatcatgat

SEQ ID NO: 1249 - DNA, 20 bp, synthetic construct
  source 1..20: mol_type = other DNA
atataattcatatacggtac

SEQ ID NO: 1250 - DNA, 20 bp, synthetic construct
  source 1..20: mol_type = other DNA
gtggtagatgctctacgtcc

SEQ ID NO: 1251 - DNA, 20 bp, synthetic construct
  source 1..20: mol_type = other DNA
tgtgttaaagagcatctacg

SEQ ID NO: 1252 - DNA, 20 bp, synthetic construct
  source 1..20: mol_type = other DNA
tataattggtgatacgcaca

SEQ ID NO: 1253 - DNA, 20 bp, synthetic construct
  source 1..20: mol_type = other DNA
atggattgtgctccccgcgt

SEQ ID NO: 1254 - DNA, 20 bp, synthetic construct
  source 1..20: mol_type = other DNA
cagaccccatcgaacacttg

SEQ ID NO: 1255 - DNA, 20 bp, synthetic construct
  source 1..20: mol_type = other DNA
aggttcccgaacaataggat

SEQ ID NO: 1256 - DNA, 20 bp, synthetic construct
  source 1..20: mol_type = other DNA
ttagccatgacactcatgat

SEQ ID NO: 1257 - DNA, 20 bp, synthetic construct
  source 1..20: mol_type = other DNA
tgagctcggcacaagtcggg

SEQ ID NO: 1258 - DNA, 20 bp, synthetic construct
  source 1..20: mol_type = other DNA
gttaacacacagccgtccat

SEQ ID NO: 1259 - DNA, 20 bp, synthetic construct
  source 1..20: mol_type = other DNA
cttgatgagtgcctcaccat

SEQ ID NO: 1260 - DNA, 20 bp, synthetic construct
  source 1..20: mol_type = other DNA
gtaaagtgaatagcggctac

SEQ ID NO: 1261 - DNA, 20 bp, synthetic construct
  source 1..20: mol_type = other DNA
gagtacgtcagtgacaatct

SEQ ID NO: 1262 - DNA, 20 bp, synthetic construct
  source 1..20: mol_type = other DNA
acagcgtggaagcacaccga

SEQ ID NO: 1263 - DNA, 20 bp, synthetic construct
  source 1..20: mol_type = other DNA
cacattgcgaaacggacggt

SEQ ID NO: 1264 - DNA, 20 bp, synthetic construct
  source 1..20: mol_type = other DNA
gagagtaaggggctcgaccc

SEQ ID NO: 1265 - DNA, 20 bp, synthetic construct
  source 1..20: mol_type = other DNA
caaagccaaccgcccatatg

SEQ ID NO: 1266 - DNA, 20 bp, synthetic construct
  source 1..20: mol_type = other DNA
gtcacaatctagtagatcgg

SEQ ID NO: 1267 - DNA, 20 bp, synthetic construct
  source 1..20: mol_type = other DNA
aggtaagtgaccatactacc

SEQ ID NO: 1268 - DNA, 20 bp, synthetic construct
  source 1..20: mol_type = other DNA
gcaagattggacacttaatc

SEQ ID NO: 1269 - DNA, 20 bp, synthetic construct
  source 1..20: mol_type = other DNA
aagtatattcgatcggaggt

SEQ ID NO: 1270 - DNA, 20 bp, synthetic construct
  source 1..20: mol_type = other DNA
atgtcatccaattcgtgtgc

SEQ ID NO: 1271 - DNA, 20 bp, synthetic construct
  source 1..20: mol_type = other DNA
aaggaagatcccacttaacg

SEQ ID NO: 1272 - DNA, 20 bp, synthetic construct
  source 1..20: mol_type = other DNA
ttattagtgtactcacgatg

SEQ ID NO: 1273 - DNA, 20 bp, synthetic construct
  source 1..20: mol_type = other DNA
tagaagtcttacgccaagac

SEQ ID NO: 1274 - DNA, 20 bp, synthetic construct
  source 1..20: mol_type = other DNA
tgaggtcagacatgcgacga

SEQ ID NO: 1275 - DNA, 20 bp, synthetic construct
  source 1..20: mol_type = other DNA
ccttgggaatacgtgtatgc

SEQ ID NO: 1276 - DNA, 20 bp, synthetic construct
  source 1..20: mol_type = other DNA
aaggtattcctattgcaacg

SEQ ID NO: 1277 - DNA, 20 bp, synthetic construct
  source 1..20: mol_type = other DNA
atcagaggctagctaaccga

SEQ ID NO: 1278 - DNA, 20 bp, synthetic construct
  source 1..20: mol_type = other DNA
caattgggatgacgcacccc

SEQ ID NO: 1279 - DNA, 20 bp, synthetic construct
  source 1..20: mol_type = other DNA
tggattcttacacttagggt

SEQ ID NO: 1280 - DNA, 20 bp, synthetic construct
  source 1..20: mol_type = other DNA
aatataccgctttggcacat

SEQ ID NO: 1281 - DNA, 20 bp, synthetic construct
  source 1..20: mol_type = other DNA
actaacaattagcgcagttg

SEQ ID NO: 1282 - DNA, 20 bp, synthetic construct
  source 1..20: mol_type = other DNA
atgactaccggtcatcacag

SEQ ID NO: 1283 - DNA, 20 bp, synthetic construct
  source 1..20: mol_type = other DNA
gaaatgatcaaacgccgtgt

SEQ ID NO: 1284 - DNA, 20 bp, synthetic construct
  source 1..20: mol_type = other DNA
ggtgctctatgcttcaccat

SEQ ID NO: 1285 - DNA, 20 bp, synthetic construct
  source 1..20: mol_type = other DNA
ggatcccactatgtcgccac

SEQ ID NO: 1286 - DNA, 20 bp, synthetic construct
  source 1..20: mol_type = other DNA
ctctgcctatacaacacgtt

SEQ ID NO: 1287 - DNA, 20 bp, synthetic construct
  source 1..20: mol_type = other DNA
agagcgtatgatcttaagga

SEQ ID NO: 1288 - DNA, 20 bp, synthetic construct
  source 1..20: mol_type = other DNA
tcaggccccagcttaaccgt

SEQ ID NO: 1289 - DNA, 20 bp, synthetic construct
  source 1..20: mol_type = other DNA
ctccgagtgggaactaacac

SEQ ID NO: 1290 - DNA, 20 bp, synthetic construct
  source 1..20: mol_type = other DNA
aagctagggacgatcatcat

SEQ ID NO: 1291 - DNA, 20 bp, synthetic construct
  source 1..20: mol_type = other DNA
gcttgaaccgggattagcta

SEQ ID NO: 1292 - DNA, 20 bp, synthetic construct
  source 1..20: mol_type = other DNA
gatatcgatccacttcgatc

SEQ ID NO: 1293 - DNA, 20 bp, synthetic construct
  source 1..20: mol_type = other DNA
aagataaagtatgcctgtac

SEQ ID NO: 1294 - DNA, 20 bp, synthetic construct
  source 1..20: mol_type = other DNA
atagaatcccttcgtaacag

SEQ ID NO: 1295 - DNA, 20 bp, synthetic construct
  source 1..20: mol_type = other DNA
aatatctacagtccgatatg

SEQ ID NO: 1296 - DNA, 20 bp, synthetic construct
  source 1..20: mol_type = other DNA
gatggggcacccattactca

SEQ ID NO: 1297 - DNA, 20 bp, synthetic construct
  source 1..20: mol_type = other DNA
ctacctcttagggttatgcc

SEQ ID NO: 1298 - DNA, 20 bp, synthetic construct
  source 1..20: mol_type = other DNA
gtagtcccgaatgtatccca

SEQ ID NO: 1299 - DNA, 20 bp, synthetic construct
  source 1..20: mol_type = other DNA
cccggcgtacagcctatccg

SEQ ID NO: 1300 - DNA, 20 bp, synthetic construct
  source 1..20: mol_type = other DNA
acaaaaggggcattactcgt

SEQ ID NO: 1301 - DNA, 20 bp, synthetic construct
  source 1..20: mol_type = other DNA
tgtggtgtggttgatcgcaa

SEQ ID NO: 1302 - DNA, 20 bp, synthetic construct
  source 1..20: mol_type = other DNA
ttatttaccacgcatacccg

SEQ ID NO: 1303 - DNA, 20 bp, synthetic construct
  source 1..20: mol_type = other DNA
gactaccggcctaaaagagc

SEQ ID NO: 1304 - DNA, 20 bp, synthetic construct
  source 1..20: mol_type = other DNA
gctgcgtagagcagtagtat

SEQ ID NO: 1305 - DNA, 20 bp, synthetic construct
  source 1..20: mol_type = other DNA
gctgcatagctgttctacat

SEQ ID NO: 1306 - DNA, 20 bp, synthetic construct
  source 1..20: mol_type = other DNA
gaacttgtgtccaaccaacc

SEQ ID NO: 1307 - DNA, 20 bp, synthetic construct
  source 1..20: mol_type = other DNA
agtcgcaattgttcagatgg

SEQ ID NO: 1308 - DNA, 20 bp, synthetic construct
  source 1..20: mol_type = other DNA
aggaatggaattagcggacc

SEQ ID NO: 1309 - DNA, 20 bp, synthetic construct
  source 1..20: mol_type = other DNA
gcagccaacagtatctatcc

SEQ ID NO: 1310 - DNA, 20 bp, synthetic construct
  source 1..20: mol_type = other DNA
accgtcatgctagtcagccc

SEQ ID NO: 1311 - DNA, 20 bp, synthetic construct
  source 1..20: mol_type = other DNA
gtggctcaccccgtcagtcg

SEQ ID NO: 1312 - DNA, 20 bp, synthetic construct
  source 1..20: mol_type = other DNA
ctgcctgccctaacgttgga

SEQ ID NO: 1313 - DNA, 20 bp, synthetic construct
  source 1..20: mol_type = other DNA
agcttgaatactacctaacc

SEQ ID NO: 1314 - DNA, 20 bp, synthetic construct
  source 1..20: mol_type = other DNA
gaacacgtaagactagactc

SEQ ID NO: 1315 - DNA, 20 bp, synthetic construct
  source 1..20: mol_type = other DNA
gtcactatggcattcgtgta

SEQ ID NO: 1316 - DNA, 20 bp, synthetic construct
  source 1..20: mol_type = other DNA
agagtctctcagctggtaca

SEQ ID NO: 1317 - DNA, 158 bp, synthetic construct
  source 1..158: mol_type = other DNA
nnnnnnnnnnnnnnnnnnnngtttaagagctatgctggaaacagcatagcaagtttaaataaggctagtccgttatcaactttgctggaaacagcaaagtggcaccgagtcggtgcttttttgaaccgacggatgatctcgtgcacagctacaaaaaa

SEQ ID NO: 1318 - DNA, 9514 bp, synthetic construct
  source 1..9514: mol_type = other DNA
gtgcacgagtgggttacatcgaactggatctcaacagcggtaagatccttgagagttttcgccccgaagaacgttttccaatgatgagcacttttaaagttctgctatgtggcgcggtattatcccgtattgacgccgggcaagagcaactcggtcgccgcatacactattctcagaatgacttggttgagtactcaccagtcacagaaaagcatcttacggatggcatgacagtaagagaattatgcagtgctgccataaccatgagtgataacactgcggccaacttacttctgacaacgatcggaggaccgaaggagctaaccgcttttttgcacaacatgggggatcatgtaactcgccttgatcgttgggaaccggagctgaatgaagccataccaaacgacgagcgtgacaccacgatgcctgtagcaatggcaacaacgttgcgcaaactattaactggcgaactacttactctagcttcccggcaacaattaatagactggatggaggcggataaagttgcaggaccacttctgcgctcggcccttccggctggctggtttattgctgataaatctggagccggtgagcgtgggtctcgcggtatcattgcagcactggggccagatggtaagccctcccgtatcgtagttatctacacgacggggagtcaggcaactatggatgaacgaaatagacagatcgctgagataggtgcctcactgattaagcattggtaactgtcagaccaagtttactcatatatactttagattgatttaaaacttcatttttaatttaaaaggatctaggtgaagatcctttttgataatctcatgaccaaaatcccttaacgtgagttttcgttccactgagcgtcagaccccgtagaaaagatcaaaggatcttcttgagatcctttttttctgcgcgtaatctgctgcttgcaaacaaaaaaaccaccgctaccagcggtggtttgtttgccggatcaagagctaccaactctttttccgaaggtaactggcttcagcagagcgcagataccaaatactgttcttctagtgtagccgtagttaggccaccacttcaagaactctgtagcaccgcctacatacctcgctctgctaatcctgttaccagtggctgctgccagtggcgataagtcgtgtcttaccgggttggactcaagacgatagttaccggataaggcgcagcggtcgggctgaacggggggttcgtgcacacagcccagcttggagcgaacgacctacaccgaactgagatacctacagcgtgagctatgagaaagcgccacgcttcccgaagggagaaaggcggacaggtatccggtaagcggcagggtcggaacaggagagcgcacgagggagcttccagggggaaacgcctggtatctttatagtcctgtcgggtttcgccacctctgacttgagcgtcgatttttgtgatgctcgtcaggggggcggagcctatggaaaaacgccagcaacgcggcctttttacggttcctggccttttgctggccttttgctcacatgttctttcctgcgttatcccctgattctgtggataaccgtattaccgcctttgagtgagctgataccgctcgccgcagccgaacgaccgagcgcagcgagtcagtgagcgaggaagcggaagagcgcccaatacgcaaaccgcctctccccgcgcgttggccgattcattaatgcagctggcacgacaggtttcccgactggaaagcgggcagtgagcgcaacgcaattaatgtgagttagctcactcattaggcaccccaggctttacactttatgcttccggctcgtatgttgtgtggaattgtgagcggataacaatttcacacaggaaacagctatgaccatgattacgccaagcgcgcaattaaccctcactaaagggaacaaaagctggagctgcaagcttaatgtagtcttatgcaatactcttgtagtcttgcaacatggtaacgatgagttagcaacatgccttacaaggagagaaaaagcaccgtgcatgccgattggtggaagtaaggtggtacgatcgtgccttattaggaaggcaacagacgggtctgacatggattggacgaaccactgaattgccgcattgcagagatattgtatttaagtgcctagctcgatacataaacgggtctctctggttagaccagatctgagcctgggagctctctggctaactagggaacccactgcttaagcctcaataaagcttgccttgagtgcttcaagtagtgtgtgcccgtctgttgtgtgactctggtaactagagatccctcagacccttttagtcagtgtggaaaatctctagcagtggcgcccgaacagggacttgaaagcgaaagggaaaccagaggagctctctcgacgcaggactcggcttgctgaagcgcgcacggcaagaggcgaggggcggcgactggtgagtacgccaaaaattttgactagcggaggctagaaggagagagatgggtgcgagagcgtcagtattaagcgggggagaattagatcgcgatgggaaaaaattcggttaaggccagggggaaagaaaaaatataaattaaaacatatagtatgggcaagcagggagctagaacgattcgcagttaatcctggcctgttagaaacatcagaaggctgtagacaaatactgggacagctacaaccatcccttcagacaggatcagaagaacttagatcattatataatacagtagcaaccctctattgtgtgcatcaaaggatagagataaaagacaccaaggaagctttagacaagatagaggaagagcaaaacaaaagtaagaccaccgcacagcaagcggccgctgatcttcagacctggaggaggagatatgagggacaattggagaagtgaattatataaatataaagtagtaaaaattgaaccattaggagtagcacccaccaaggcaaagagaagagtggtgcagagagaaaaaagagcagtgggaataggagctttgttccttgggttcttgggagcagcaggaagcactatgggcgcagcgtcaatgacgctgacggtacaggccagacaattattgtctggtatagtgcagcagcagaacaatttgctgagggctattgaggcgcaacagcatctgttgcaactcacagtctggggcatcaagcagctccaggcaagaatcctggctgtggaaagatacctaaaggatcaacagctcctggggatttggggttgctctggaaaactcatttgcaccactgctgtgccttggaatgctagttggagtaataaatctctggaacagatttggaatcacacgacctggatggagtgggacagagaaattaacaattacacaagcttaatacactccttaattgaagaatcgcaaaaccagcaagaaaagaatgaacaagaattattggaattagataaatgggcaagtttgtggaattggtttaacataacaaattggctgtggtatataaaattattcataatgatagtaggaggcttggtaggtttaagaatagtttttgctgtactttctatagtgaatagagttaggcagggatattcaccattatcgtttcagacccacctcccaaccccgaggggacccgacaggcccgaaggaatagaagaagaaggtggagagagagacagagacagatccattcgattagtgaacggatctcgacggtatcgatgagggcctatttcccatgattccttcatatttgcatatacgatacaaggctgttagagagataattagaattaatttgactgtaaacacaaagatattagtacaaaatacgtgacgtagaaagtaataatttcttgggtagtttgcagttttaaaattatgttttaaaatggactatcatatgcttaccgtaacttgaaagtatttcgatttcttggctttatatatcttgtggaaaggacgaaacaccgnnnnnnnnnnnnnnnnnnnngtttaagagctatgctggaaacagcatagcaagtttaaataaggctagtccgttatcaactttgctggaaacagcaaagtggcaccgagtcggtgcttttttgaaccgacggatgatctcgtgcacagctacaaaaaagcacccgactcgggtgccactttttcaagttgtaaacggactagccttatttcaacttgctatgcactcttgtgcttagctctgaaactgtaccagctgagagactctcgggaaagagtggtctcatacagaacttataagattcccaaatccaaagacatttcacgtttatggtgatttcccagaacacatagcgacatgcaaatattgcagggcgccactcccctgtccctcacagccatcttcctgccagggcgcacgcgcgctgggtgttcccgcctagtgacactgggcccgcgattccttggagcgggttgatgacgtcagcgttcgaattcgctagcgggacccatgcatccacaattttaaaagaaaaggggggattggggggtacagtgcaggggaaagaatagtagacataatagcaacagacatacaaactaaagaattacaaaaacaaattacaaaaattcaaaattttcgggtttattacagggacagcagagatccagtttggctgcatacgcgtttgcgccttttccaaggcagccctgggtttgcgcagggacgcggctgctctgggcgtggttccgggaaacgcagcggcgccgaccctgggtctcgcacattcttcacgtccgttcgcagcgtcacccggatcttcgccgctacccttgtgggccccccggcgacgcttcctgctccgcccctaagtcgggaaggttccttgcggttcgcggcgtgccggacgtgacaaacggaagccgcacatctcactagtaccctcgcagacggacagcgccagggagcaatggcagcgcgccgaccgcgatgggctgtggccaatagcggctgctcagcagggcgcgccgagagcagcggccgggaaggggcggtgcgggaggcggggtgtggggcggtagtgtgggccctgttcctgcccgcgcggtgttccgcattctgcaagcctccggagcgcacgtcggcagtcggctccctcgttgaccgaatcaccgacctctctccccaggccaccatgctcgagggagtgcaggtggagactatctccccaggcgacgggcgcaccttccccaagcgcggccagacctgcgtggtgcactacaccgggatgcttgaagatggaaagaaagttgattcctcccgggacagaaacaagccctttaagtttatgctaggcaagcaggaggtgatccgaggctgggaagaaggggttgcccagatgagtgtgggtcagagagccaaactgactatatctccagattatgcctatggtgccactgggcacccaggcatcatcccaccacatgccactctcgtcttcgatgtggagcttctaaaactggaatctggcggtggatccggagtcgacggatttggtgatgtcggtgctcttgagagtttgaggggaaatgcagatttggcttacatcctgagcatggagccctgtggccactgcctcattatcaacaatgtgaacttctgccgtgagtccgggctccgcacccgcactggctccaacatcgactgtgagaagttgcggcgtcgcttctcctcgctgcatttcatggtggaggtgaagggcgacctgactgccaagaaaatggtgctggctttgctggagctggcgcggcaggaccacggtgctctggactgctgcgtggtggtcattctctctcacggctgtcaggccagccacctgcagttcccaggggctgtctacggcacagatggatgccctgtgtcggtcgagaagattgtgaacatcttcaatgggaccagctgccccagcctgggagggaagcccaagctctttttcatccaggcctgtggtggggagcagaaagaccatgggtttgaggtggcctccacttcccctgaagacgagtcccctggcagtaaccccgagccagatgccaccccgttccaggaaggtttgaggaccttcgaccagctggacgccatatctagtttgcccacacccagtgacatctttgtgtcctactctactttcccaggttttgtttcctggagggaccccaagagtggctcctggtacgttgagaccctggacgacatctttgagcagtgggctcactctgaagacctgcagtccctcctgcttagggtcgctaatgctgtttcggtgaaagggatttataaacagatgcctggttgctttaatttcctccggaaaaaacttttctttaaaacatcagctagcagagccggatctggcgccacgaacttctctctgttaaagcaagcaggcgacgtggaagaaaaccccggtcccatgggggcaggtgccaccggccgcgccatggacgggccgcgcctgctgctgttgctgcttctgggggtgtcccttggaggtgccaaggaggcatgccccacaggcctgtacacacacagcggtgagtgctgcaaagcctgcaacctgggcgagggtgtggcccagccttgtggagccaaccagaccgtgtgtgagccctgcctggacagcgtgacgttctccgacgtggtgagcgcgaccgagccgtgcaagccgtgcaccgagtgcgtggggctccagagcatgtcggcgccgtgcgtggaggccgacgacgccgtgtgccgctgcgcctacggctactaccaggatgagaccactgggcgctgcgaggcgtgccgcgtgtgcgaggcgggctcgggcctcgtgttctcctgccaggacaagcagaacaccgtgtgcgaggagtgccccgacggcacgtattccgacgaggccaaccacgtggacccgtgcctgccctgcaccgtgtgcgaggacaccgagcgccagctccgcgagtgcacacgctgggccgacgccgagtgcgaggagatccctggccgttggattacacggtccacacccccagagggctcggacagcacagcccccagcacccaggagcctgaggcacctccagaacaagacctcatagccagcacggtggcaggtgtggtgaccacagtgatgggcagctcccagcccgtcgtgacccgaggcaccaccgacaacctcatccctgtctattgctccatcctggctgctgtggttgtgggccttgtggcctacatagccttcaagaggtggaacagggggatcctctaggtcgacaatcaacctctggattacaaaatttgtgaaagattgactggtattcttaactatgttgctccttttacgctatgtggatacgctgctttaatgcctttgtatcatgctattgcttcccgtatggctttcattttctcctccttgtataaatcctggttgctgtctctttatgaggagttgtggcccgttgtcaggcaacgtggcgtggtgtgcactgtgtttgctgacgcaacccccactggttggggcattgccaccacctgtcagctcctttccgggactttcgctttccccctccctattgccacggcggaactcatcgccgcctgccttgcccgctgctggacaggggctcggctgttgggcactgacaattccgtggtgttgtcggggaagctgacgtcctttccttggctgctcgcctgtgttgccacctggattctgcgcgggacgtccttctgctacgtcccttcggccctcaatccagcggaccttccttcccgcggcctgctgccggctctgcggcctcttccgcgtcttcgccttcgccctcagacgagtcggatctccctttgggccgcctccccgcctggaattcgagctcggtacctttaagaccaatgacttacaaggcagctgtagatcttagccactttttaaaagaaaaggggggactggaagggctaattcactcccaacgaagacaagatctgctttttgcttgtactgggtctctctggttagaccagatctgagcctgggagctctctggctaactagggaacccactgcttaagcctcaataaagcttgccttgagtgcttcaagtagtgtgtgcccgtctgttgtgtgactctggtaactagagatccctcagacccttttagtcagtgtggaaaatctctagcagtagtagttcatgtcatcttattattcagtatttataacttgcaaagaaatgaatatcagagagtgagaggaacttgtttattgcagcttataatggttacaaataaagcaatagcatcacaaatttcacaaataaagcatttttttcactgcattctagttgtggtttgtccaaactcatcaatgtatcttatcatgtctggctctagctctaccgatcccgcccctaactccgcccagttccgcccattctccgccccatggctgactaattttttttatttatgcagaggccgaggccgcctcggcctctgagctattccagaagtagtgaggaggcttttttggaggcactcctagggacgtacccaattcgccctatagtgagtcgtattacgcgcgctcactggccgtcgttttacaacgtcgtgactgggaaaaccctggcgttacccaacttaatcgccttgcagcacatccccctttcgccagctggcgtaatagcgaagaggcccgcaccgatcgcccttcccaacagttgcgcagcctgaatggcgaatgggacgcgccctgtagcggcgcattaagcgcggcgggtgtggtggttacgcgcagcgtgaccgctacacttgccagcgccctagcgcccgctcctttcgctttcttcccttcctttctcgccacgttcgccggctttccccgtcaagctctaaatcgggggctccctttagggttccgatttagtgctttacggcacctcgaccccaaaaaacttgattagggtgatggttcacgtagtgggccatcgccctgatagacggtttttcgccctttgacgttggagtccacgttctttaatagtggactcttgttccaaactggaacaacactcaaccctatctcggtctattcttttgatttataagggattttgccgatttcggcctattggttaaaaaatgagctgatttaacaaaaatttaacgcgaattttaacaaaatattaacgcttacaatttaggtggcacttttcggggaaatgtgcgcggaacccctatttgtttatttttctaaatacattcaaatatgtatccgctcatgagacaataaccctgataaatgcttcaataatattgaaaaaggaagagtatgagtattcaacatttccgtgtcgcccttattcccttttttgcggcattttgccttcctgtttttgctcacccagaaacgctggtgaaagtaaaagatgctgaagatcagttgg

SEQ ID NO: 1319 - DNA, 8729 bp, synthetic construct
  source 1..8729: mol_type = other DNA
gtgcacgagtgggttacatcgaactggatctcaacagcggtaagatccttgagagttttcgccccgaagaacgttttccaatgatgagcacttttaaagttctgctatgtggcgcggtattatcccgtattgacgccgggcaagagcaactcggtcgccgcatacactattctcagaatgacttggttgagtactcaccagtcacagaaaagcatcttacggatggcatgacagtaagagaattatgcagtgctgccataaccatgagtgataacactgcggccaacttacttctgacaacgatcggaggaccgaaggagctaaccgcttttttgcacaacatgggggatcatgtaactcgccttgatcgttgggaaccggagctgaatgaagccataccaaacgacgagcgtgacaccacgatgcctgtagcaatggcaacaacgttgcgcaaactattaactggcgaactacttactctagcttcccggcaacaattaatagactggatggaggcggataaagttgcaggaccacttctgcgctcggcccttccggctggctggtttattgctgataaatctggagccggtgagcgtgggtctcgcggtatcattgcagcactggggccagatggtaagccctcccgtatcgtagttatctacacgacggggagtcaggcaactatggatgaacgaaatagacagatcgctgagataggtgcctcactgattaagcattggtaactgtcagaccaagtttactcatatatactttagattgatttaaaacttcatttttaatttaaaaggatctaggtgaagatcctttttgataatctcatgaccaaaatcccttaacgtgagttttcgttccactgagcgtcagaccccgtagaaaagatcaaaggatcttcttgagatcctttttttctgcgcgtaatctgctgcttgcaaacaaaaaaaccaccgctaccagcggtggtttgtttgccggatcaagagctaccaactctttttccgaaggtaactggcttcagcagagcgcagataccaaatactgttcttctagtgtagccgtagttaggccaccacttcaagaactctgtagcaccgcctacatacctcgctctgctaatcctgttaccagtggctgctgccagtggcgataagtcgtgtcttaccgggttggactcaagacgatagttaccggataaggcgcagcggtcgggctgaacggggggttcgtgcacacagcccagcttggagcgaacgacctacaccgaactgagatacctacagcgtgagctatgagaaagcgccacgcttcccgaagggagaaaggcggacaggtatccggtaagcggcagggtcggaacaggagagcgcacgagggagcttccagggggaaacgcctggtatctttatagtcctgtcgggtttcgccacctctgacttgagcgtcgatttttgtgatgctcgtcaggggggcggagcctatggaaaaacgccagcaacgcggcctttttacggttcctggccttttgctggccttttgctcacatgttctttcctgcgttatcccctgattctgtggataaccgtattaccgcctttgagtgagctgataccgctcgccgcagccgaacgaccgagcgcagcgagtcagtgagcgaggaagcggaagagcgcccaatacgcaaaccgcctctccccgcgcgttggccgattcattaatgcagctggcacgacaggtttcccgactggaaagcgggcagtgagcgcaacgcaattaatgtgagttagctcactcattaggcaccccaggctttacactttatgcttccggctcgtatgttgtgtggaattgtgagcggataacaatttcacacaggaaacagctatgaccatgattacgccaagcgcgcaattaaccctcactaaagggaacaaaagctggagctgcaagcttaatgtagtcttatgcaatactcttgtagtcttgcaacatggtaacgatgagttagcaacatgccttacaaggagagaaaaagcaccgtgcatgccgattggtggaagtaaggtggtacgatcgtgccttattaggaaggcaacagacgggtctgacatggattggacgaaccactgaattgccgcattgcagagatattgtatttaagtgcctagctcgatacataaacgggtctctctggttagaccagatctgagcctgggagctctctggctaactagggaacccactgcttaagcctcaataaagcttgccttgagtgcttcaagtagtgtgtgcccgtctgttgtgtgactctggtaactagagatccctcagacccttttagtcagtgtggaaaatctctagcagtggcgcccgaacagggacttgaaagcgaaagggaaaccagaggagctctctcgacgcaggactcggcttgctgaagcgcgcacggcaagaggcgaggggcggcgactggtgagtacgccaaaaattttgactagcggaggctagaaggagagagatgggtgcgagagcgtcagtattaagcgggggagaattagatcgcgatgggaaaaaattcggttaaggccagggggaaagaaaaaatataaattaaaacatatagtatgggcaagcagggagctagaacgattcgcagttaatcctggcctgttagaaacatcagaaggctgtagacaaatactgggacagctacaaccatcccttcagacaggatcagaagaacttagatcattatataatacagtagcaaccctctattgtgtgcatcaaaggatagagataaaagacaccaaggaagctttagacaagatagaggaagagcaaaacaaaagtaagaccaccgcacagcaagcggccgctgatcttcagacctggaggaggagatatgagggacaattggagaagtgaattatataaatataaagtagtaaaaattgaaccattaggagtagcacccaccaaggcaaagagaagagtggtgcagagagaaaaaagagcagtgggaataggagctttgttccttgggttcttgggagcagcaggaagcactatgggcgcagcgtcaatgacgctgacggtacaggccagacaattattgtctggtatagtgcagcagcagaacaatttgctgagggctattgaggcgcaacagcatctgttgcaactcacagtctggggcatcaagcagctccaggcaagaatcctggctgtggaaagatacctaaaggatcaacagctcctggggatttggggttgctctggaaaactcatttgcaccactgctgtgccttggaatgctagttggagtaataaatctctggaacagatttggaatcacacgacctggatggagtgggacagagaaattaacaattacacaagcttaatacactccttaattgaagaatcgcaaaaccagcaagaaaagaatgaacaagaattattggaattagataaatgggcaagtttgtggaattggtttaacataacaaattggctgtggtatataaaattattcataatgatagtaggaggcttggtaggtttaagaatagtttttgctgtactttctatagtgaatagagttaggcagggatattcaccattatcgtttcagacccacctcccaaccccgaggggacccgacaggcccgaaggaatagaagaagaaggtggagagagagacagagacagatccattcgattagtgaacggatctcgacggtatcgattagactgtagcccaggaatatggcagctagattgtacacatttagaaggaaaagttatcttggtagcagttcatgtagccagtggatatatagaagcagaagtaattccagcagagacagggcaagaaacagcatacttcctcttaaaattagcaggaagatggccagtaaaaacagtacatacagacaatggcagcaatttcaccagtactacagttaaggccgcctgttggtgggcggggatcaagcaggaatttggcattccctacaatccccaaagtcaaggagtaatagaatctatgaataaagaattaaagaaaattataggacaggtaagagatcaggctgaacatcttaagacagcagtacaaatggcagtattcatccacaattttaaaagaaaaggggggattggggggtacagtgcaggggaaagaatagtagacataatagcaacagacatacaaactaaagaattacaaaaacaaattacaaaaattcaaaattttcgggtttattacagggacagcagagatccagtttggctgcatacgcgtcgtgaggctccggtgcccgtcagtgggcagagcgcacatcgcccacagtccccgagaagttggggggaggggtcggcaattgaaccggtgcctagagaaggtggcgcggggtaaactgggaaagtgatgtcgtgtactggctccgcctttttcccgagggtgggggagaaccgtatataagtgcagtagtcgccgtgaacgttctttttcgcaacgggtttgccgccagaacacaggtaagtgccgtgtgtggttcccgcgggcctggcctctttacgggttatggcccttgcgtgccttgaattacttccacctggctgcagtacgtgattcttgatcccgagcttcgggttggaagtgggtgggagagttcgaggccttgcgcttaaggagccccttcgcctcgtgcttgagttgaggcctggcctgggcgctggggccgccgcgtgcgaatctggtggcaccttcgcgcctgtctcgctgctttcgataagtctctagccatttaaaatttttgatgacctgctgcgacgctttttttctggcaagatagtcttgtaaatgcgggccaagatctgcacactggtatttcggtttttggggccgcgggcggcgacggggcccgtgcgtcccagcgcacatgttcggcgaggcggggcctgcgagcgcggccaccgagaatcggacgggggtagtctcaagctggccggcctgctctggtgcctggcctcgcgccgccgtgtatcgccccgccctgggcggcaaggctggcccggtcggcaccagttgcgtgagcggaaagatggccgcttcccggccctgctgcagggagctcaaaatggaggacgcggcgctcgggagagcgggcgggtgagtcacccacacaaaggaaaagggcctttccgtcctcagccgtcgcttcatgtgactccactgagtaccgggcgccgtccaggcacctcgattagttctcgtgcttttggagtacgtcgtctttaggttggggggaggggttttatgcgatggagtttccccacactgagtgggtggagactgaagttaggccagcttggcacttgatgtaattctccttggaatttgccctttttgagtttggatcttggttcattctcaagcctcagacagtggttcaaagtttttttcttccatttcaggtgtcgtgaagctctagagccnnnntccggaggcggcggagagggcagaggaagtcttctaacatgcggtgacgtggaggagaatcccggccctaggatgccgcggggctggaccgcgctttgcttgctgagtttgctgccttctgggttcatgagtcttgacaacaacggtactgctaccccagagttacctacccagggaacattttcaaatgtttctacaaatgtatcctaccaagaaactacaacacctagtacccttggaagtaccagcctgcaccctgtgtctcaacatggcaatgaggccacaacaaacatcacagaaacgacagtcaaattcacatctacctctgtgataacctcagtttatggaaacacaaactcttctgtccagtcacagacctctgtaatcagcacagtgttcaccaccccagccaacgtttcaactccagagacaaccttgaagcctagcctgtcacctggaaatgtttcagacctttcaaccactagcactagccttgcaacatctcccactaaaccctatacatcatcttctcctatcctaagtgacatcaaggcagaaatcaaatgttcaggcatcagagaagtgaaattgactcagggcatctgcctggagcaaaataagacctccagctgtgcggagtttaagaaggacaggggagagggcctggcccgagtgctgtgtggggaggagcaggctgatgctgatgctggggcccaggtatgctccctgctccttgcccagtctgaggtgaggcctcagtgtctactgctggtcttggccaacagaacagaaatttccagcaaactccaacttatgaaaaagcaccaatctgacctgaaaaagctggggatcctagatttcactgagcaagatgttgcaagccaccagagctattcccaaaagaccctgattgcactggtcacctcgggagccctgctggtggtcttgggcatcactggctatttcctgatgaatcgccgcagctggagccccacaggagaaaggctggaactagaaccatgagtcgacaatcaacctctggattacaaaatttgtgaaagattgactggtattcttaactatgttgctccttttacgctatgtggatacgctgctttaatgcctttgtatcatgctattgcttcccgtatggctttcattttctcctccttgtataaatcctggttgctgtctctttatgaggagttgtggcccgttgtcaggcaacgtggcgtggtgtgcactgtgtttgctgacgcaacccccactggttggggcattgccaccacctgtcagctcctttccgggactttcgctttccccctccctattgccacggcggaactcatcgccgcctgccttgcccgctgctggacaggggctcggctgttgggcactgacaattccgtggtgttgtcggggaagctgacgtcctttccttggctgctcgcctgtgttgccacctggattctgcgcgggacgtccttctgctacgtcccttcggccctcaatccagcggaccttccttcccgcggcctgctgccggctctgcggcctcttccgcgtcttcgccttcgccctcagacgagtcggatctccctttgggccgcctccccgcctggaattcgagctcggtacctttaagaccaatgacttacaaggcagctgtagatcttagccactttttaaaagaaaaggggggactggaagggctaattcactcccaacgaagacaagatctgctttttgcttgtactgggtctctctggttagaccagatctgagcctgggagctctctggctaactagggaacccactgcttaagcctcaataaagcttgccttgagtgcttcaagtagtgtgtgcccgtctgttgtgtgactctggtaactagagatccctcagacccttttagtcagtgtggaaaatctctagcagtagtagttcatgtcatcttattattcagtatttataacttgcaaagaaatgaatatcagagagtgagaggaacttgtttattgcagcttataatggttacaaataaagcaatagcatcacaaatttcacaaataaagcatttttttcactgcattctagttgtggtttgtccaaactcatcaatgtatcttatcatgtctggctctagctctaccgatcccgcccctaactccgcccagttccgcccattctccgccccatggctgactaattttttttatttatgcagaggccgaggccgcctcggcctctgagctattccagaagtagtgaggaggcttttttggaggcactcctagggacgtacccaattcgccctatagtgagtcgtattacgcgcgctcactggccgtcgttttacaacgtcgtgactgggaaaaccctggcgttacccaacttaatcgccttgcagcacatccccctttcgccagctggcgtaatagcgaagaggcccgcaccgatcgcccttcccaacagttgcgcagcctgaatggcgaatgggacgcgccctgtagcggcgcattaagcgcggcgggtgtggtggttacgcgcagcgtgaccgctacacttgccagcgccctagcgcccgctcctttcgctttcttcccttcctttctcgccacgttcgccggctttccccgtcaagctctaaatcgggggctccctttagggttccgatttagtgctttacggcacctcgaccccaaaaaacttgattagggtgatggttcacgtagtgggccatcgccctgatagacggtttttcgccctttgacgttggagtccacgttctttaatagtggactcttgttccaaactggaacaacactcaaccctatctcggtctattcttttgatttataagggattttgccgatttcggcctattggttaaaaaatgagctgatttaacaaaaatttaacgcgaattttaacaaaatattaacgcttacaatttaggtggcacttttcggggaaatgtgcgcggaacccctatttgtttatttttctaaatacattcaaatatgtatccgctcatgagacaataaccctgataaatgcttcaataatattgaaaaaggaagagtatgagtattcaacatttccgtgtcgcccttattcccttttttgcggcattttgccttcctgtttttgctcacccagaaacgctggtgaaagtaaaagatgctgaagatcagttgg

SEQ ID NO: 1320 - protein, 404 aa, synthetic construct
MLEGVQVETISPGDGRTFPKRGQTCVVHYTGMLEDGKKVDSSRDRNKPFKFMLGKQEVIRGWEEGVAQMSVGQRAKLTISPDYAYGATGHPGIIPPHATLVFDVELLKLESGGGSGVDGFGDVGALESLRGNADLAYILSMEPCGHCLIINNVNFCRESGLRTRTGSNIDCEKLRRRFSSLHFMVEVKGDLTAKKMVLALLELARQDHGALDCCVVVILSHGCQASHLQFPGAVYGTDGCPVSVEKIVNIFNGTSCPSLGGKPKLFFIQACGGEQKDHGFEVASTSPEDESPGSNPEPDATPFQEGLRTFDQLDAISSLPTPSDIFVSYSTFPGFVSWRDPKSGSWYVETLDDIFEQWAHSEDLQSLLLRVANAVSVKGIYKQMPGCFNFLRKKLFFKTSASRA

SEQ ID NO: 1321 - protein, 280 aa, synthetic construct
MGAGATGRAMDGPRLLLLLLLGVSLGGAKEACPTGLYTHSGECCKACNLGEGVAQPCGANQTVCEPCLDSVTFSDVVSATEPCKPCTECVGLQSMSAPCVEADDAVCRCAYGYYQDETTGRCEACRVCEAGSGLVFSCQDKQNTVCEECPDGTYSDEANHVDPCLPCTVCEDTERQLRECTRWADAECEEIPGRWITRSTPPEGSDSTAPSTQEPEAPPEQDLIASTVAGVVTTVMGSSQPVVTRGTTDNLIPVYCSILAAVVVGLVAYIAFKRWNRGIL

SEQ ID NO: 1322 - protein, 333 aa, synthetic construct
MPPPRLLFFLLFLTPMEVRPEEPLVVKVEEGDNAVLQCLKGTSDGPTQQLTWSRESPLKPFLKLSLGLPGLGIHMRPLAIWLFIFNVSQQMGGFYLCQPGPPSEKAWQPGWTVNVEGSGELFRWNVSDLGGLGCGLKNRSSEGPSSPSGKLMSPKLYVWAKDRPEIWEGEPPCLPPRDSLNQSLSQDLTMAPGSTLWLSCGVPPDSVSRGPLSWTHVHPKGPKSLLSLELKDDRPARDMWVMETGLLLPRATAQDAGKYYCHRGNLTMSFHLEITARPVLWHWLLRTGGWKVSAVTLAYLIFCLCSLVGILHLQRALVLRRKRKRMTDPTRRF

SEQ ID NO: 1323 - protein, 316 aa, synthetic construct
MPRGWTALCLLSLLPSGFMSLDNNGTATPELPTQGTFSNVSTNVSYQETTTPSTLGSTSLHPVSQHGNEATTNITETTVKFTSTSVITSVYGNTNSSVQSQTSVISTVFTTPANVSTPETTLKPSLSPGNVSDLSTTSTSLATSPTKPYTSSSPILSDIKAEIKCSGIREVKLTQGICLEQNKTSSCAEFKKDRGEGLARVLCGEEQADADAGAQVCSLLLAQSEVRPQCLLLVLANRTEISSKLQLMKKHQSDLKKLGILDFTEQDVASHQSYSQKTLIALVTSGALLVVLGITGYFLMNRRSWSPTGERLELEP

SEQ ID NO: 1324 - DNA, 84 bp, synthetic construct
  source 1..84: mol_type = other DNA
  modified_base 80..84: mod_base = OTHER; note = phosphorothioate modifications
  misc_difference 59..67: note = may be absent
aatgatacggcgaccaccgagatctacactctttccctacacgacgctcttccgatctnnnnnnnnntcttgtggaaaggacga

SEQ ID NO: 1325 - DNA, 92 bp, synthetic construct
  source 1..92: mol_type = other DNA
  modified_base 88..92: mod_base = OTHER; note = phosphorothioate modifications
  misc_difference 25..33: note = may be absent
caagcagaagacggcatacgagatnnnnnnnnngtgactggagttcagacgtgtgctcttccgatcttctactattctttcccctgcactgt

SEQ ID NO: 1326 - protein, 792 aa, synthetic construct
MALPVTALLLPLALLLHAARPMECNWILPFILSVTSGVYSEILLQQTGTVLARPGTSVKMSCKASGYTFTNYRMHWVKQRPGQGLEWIGGIYPGNSDTNYNQKFKDKAKLTAVTSTSTANMELSSLTNEDSAVYYCLRGIRGSYFDYWGQGTTLTVSSGGGGSGGGGSGGGGSGGGGSMETDTILLWVLLLWVPGSTGDIVLTQSPASLAVSLGQRATISCKASQSVDYDGDSYMNWYQQKPGQPPKLLIYAASNLESGIPARFSGSGSGTDFTLNIHPVEEEDAATYYCQQSNEDPSTFGGGTKLEVKTTTPAPRPPTPAPTIASQPLSLRPEACRPAAGGAVHTRGLDFACDIYIWAPLAGTCGVLLLSLVITLYCKRGRKKLLYIFKQPFMRPVQTTQEEDGCSCRFPEEEEGGCELRVKFSRSADAPAYQQGQNQLYNELNLGRREEYDVLDKRRGRDPEMGGKPRRKNPQEGLYNELQKDKMAEAYSEIGMKGERRRGKGHDGLYQGLSTATKDTYDALHMQALPPRSGGGGEGRGSLLTCGDVEENPGPRMVSKGEEDNMAIIKEFMRFKVHMEGSVNGHEFEIEGEGEGRPYEGTQTAKLKVTKGGPLPFAWDILSPQFMYGSKAYVKHPADIPDYLKLSFPEGFKWERVMNFEDGGVVTVTQDSSLQDGEFIYKVKLRGTNFPSDGPVMQKKTMGWEASSERMYPEDGALKGEIKQRLKLKDGGHYDAEVKTTYKAKKPVQLPGAYNVNIKLDITSHNEDYTIVEQYERAEGRHSTGGMDELYK

SEQ ID NO: 1327 - protein, 792 aa, synthetic construct
MALPVTALLLPLALLLHAARPMETDTILLWVLLLWVPGSTGDIVLTQSPASLAVSLGQRATISCKASQSVDYDGDSYMNWYQQKPGQPPKLLIYAASNLESGIPARFSGSGSGTDFTLNIHPVEEEDAATYYCQQSNEDPSTFGGGTKLEVKGGGGSGGGGSGGGGSGGGGSMECNWILPFILSVTSGVYSEILLQQTGTVLARPGTSVKMSCKASGYTFTNYRMHWVKQRPGQGLEWIGGIYPGNSDTNYNQKFKDKAKLTAVTSTSTANMELSSLTNEDSAVYYCLRGIRGSYFDYWGQGTTLTVSSTTTPAPRPPTPAPTIASQPLSLRPEACRPAAGGAVHTRGLDFACDIYIWAPLAGTCGVLLLSLVITLYCKRGRKKLLYIFKQPFMRPVQTTQEEDGCSCRFPEEEEGGCELRVKFSRSADAPAYQQGQNQLYNELNLGRREEYDVLDKRRGRDPEMGGKPRRKNPQEGLYNELQKDKMAEAYSEIGMKGERRRGKGHDGLYQGLSTATKDTYDALHMQALPPRSGGGGEGRGSLLTCGDVEENPGPRMVSKGEEDNMAIIKEFMRFKVHMEGSVNGHEFEIEGEGEGRPYEGTQTAKLKVTKGGPLPFAWDILSPQFMYGSKAYVKHPADIPDYLKLSFPEGFKWERVMNFEDGGVVTVTQDSSLQDGEFIYKVKLRGTNFPSDGPVMQKKTMGWEASSERMYPEDGALKGEIKQRLKLKDGGHYDAEVKTTYKAKKPVQLPGAYNVNIKLDITSHNEDYTIVEQYERAEGRHSTGGMDELYK

SEQ ID NO: 1328 - protein, 791 aa, synthetic construct
MALPVTALLLPLALLLHAARPMECNWILPFILSVTSGVYSEILLQQTGTVLARPGTSVKMSCKASGYTFTNYRMHWVKQRPGQGLEWIGGIYPGNSDTNYNQKFKDKAKLTAVTSTSTANMELSSLTNEDSAVYYCLRGIRGSYFDYWGQGTTLTVSSGGGGSGGGGSGGGGSGGGGSMETDTILLWVLLLWVPGSTGDIVLTQSPASLAVSLGQRATISCKASQSVDYDGDSYMNWYQQKPGQPPKLLIYAASNLESGIPARFSGSGSGTDFTLNIHPVEEEDAATYYCQQSNEDPSTFGGGTKLEVKTTTPAPRPPTPAPTIASQPLSLRPEACRPAAGGAVHTRGLDFACDIYIWAPLAGTCGVLLLSLVITLYCRSKRSRLLHSDYMNMTPRRPGPTRKHYQPYAPPRDFAAYRSRVKFSRSADAPAYQQGQNQLYNELNLGRREEYDVLDKRRGRDPEMGGKPRRKNPQEGLYNELQKDKMAEAYSEIGMKGERRRGKGHDGLYQGLSTATKDTYDALHMQALPPRSGGGGEGRGSLLTCGDVEENPGPRMVSKGEEDNMAIIKEFMRFKVHMEGSVNGHEFEIEGEGEGRPYEGTQTAKLKVTKGGPLPFAWDILSPQFMYGSKAYVKHPADIPDYLKLSFPEGFKWERVMNFEDGGVVTVTQDSSLQDGEFIYKVKLRGTNFPSDGPVMQKKTMGWEASSERMYPEDGALKGEIKQRLKLKDGGHYDAEVKTTYKAKKPVQLPGAYNVNIKLDITSHNEDYTIVEQYERAEGRHSTGGMDELYK

SEQ ID NO: 1329 - protein, 791 aa, synthetic construct
MALPVTALLLPLALLLHAARPMETDTILLWVLLLWVPGSTGDIVLTQSPASLAVSLGQRATISCKASQSVDYDGDSYMNWYQQKPGQPPKLLIYAASNLESGIPARFSGSGSGTDFTLNIHPVEEEDAATYYCQQSNEDPSTFGGGTKLEVKGGGGSGGGGSGGGGSGGGGSMECNWILPFILSVTSGVYSEILLQQTGTVLARPGTSVKMSCKASGYTFTNYRMHWVKQRPGQGLEWIGGIYPGNSDTNYNQKFKDKAKLTAVTSTSTANMELSSLTNEDSAVYYCLRGIRGSYFDYWGQGTTLTVSSTTTPAPRPPTPAPTIASQPLSLRPEACRPAAGGAVHTRGLDFACDIYIWAPLAGTCGVLLLSLVITLYCRSKRSRLLHSDYMNMTPRRPGPTRKHYQPYAPPRDFAAYRSRVKFSRSADAPAYQQGQNQLYNELNLGRREEYDVLDKRRGRDPEMGGKPRRKNPQEGLYNELQKDKMAEAYSEIGMKGERRRGKGHDGLYQGLSTATKDTYDALHMQALPPRSGGGGEGRGSLLTCGDVEENPGPRMVSKGEEDNMAIIKEFMRFKVHMEGSVNGHEFEIEGEGEGRPYEGTQTAKLKVTKGGPLPFAWDILSPQFMYGSKAYVKHPADIPDYLKLSFPEGFKWERVMNFEDGGVVTVTQDSSLQDGEFIYKVKLRGTNFPSDGPVMQKKTMGWEASSERMYPEDGALKGEIKQRLKLKDGGHYDAEVKTTYKAKKPVQLPGAYNVNIKLDITSHNEDYTIVEQYERAEGRHSTGGMDELYK

SEQ ID NO: 1330 - protein, 739 aa, synthetic construct
EIVMTQSPATLSLSPGERATLSCRASQDISKYLNWYQQKPGQAPRLLIYHTSRLHSGIPARFSGSGSGTDYTLTISSLQPEDFAVYFCQQGNTLPYTFGQGTKLEIKGGGGSGGGGSGGGGSGGGGSQVQLQESGPGLVKPSETLSLTCTVSGVSLPDYGVSWIRQPPGKGLEWIGVIWGSETTYYQSSLKSRVTISKDNSKNQVSLKLSSVTAADTAVYYCAKHYYYGGSYAMDYWGQGTLVTVSSGGGGSGGGGSGGGGSGGGGSDIQLTQSPSSLSASVGDRVTITCKASQSVDYEGDSFLNWYQQKPGKAPKLLIYAASNLESGVPSRFSGSGSGIDFTLTISSLQPEDFATYYCQQSNEDPLTFGQGTKVEIKRGGGGSGGGGSGGGGSGGGGSEVQLVESGGGLVQPGGSLRLSCAASGYTFSSYWIEWVRQAPGKGLEWIGEILPGGGDTNYNEIFKGRATFSADTSKNTAYLQMNSLRAEDTAVYYCTRRVPIRLDYWGQGTLVTVSSTTTPAPRPPTPAPTIASQPLSLRPEACRPAAGGAVHTRGLDFACDIYIWAPLAGTCGVLLLSLVITLYCKRGRKKLLYIFKQPFMRPVQTTQEEDGCSCRFPEEEEGGCELRVKFSRSADAPAYQQGQNQLYNELNLGRREEYDVLDKRRGRDPEMGGKPRRKNPQEGLYNELQKDKMAEAYSEIGMKGERRRGKGHDGLYQGLSTATKDTYDALHMQALPPR

SEQ ID NO: 1331 - protein, 739 aa, synthetic construct
DIQLTQSPSSLSASVGDRVTITCKASQSVDYEGDSFLNWYQQKPGKAPKLLIYAASNLESGVPSRFSGSGSGIDFTLTISSLQPEDFATYYCQQSNEDPLTFGQGTKVEIKRGGGGSGGGGSGGGGSGGGGSEVQLVESGGGLVQPGGSLRLSCAASGYTFSSYWIEWVRQAPGKGLEWIGEILPGGGDTNYNEIFKGRATFSADTSKNTAYLQMNSLRAEDTAVYYCTRRVPIRLDYWGQGTLVTVSSGGGGSGGGGSGGGGSGGGGSEIVMTQSPATLSLSPGERATLSCRASQDISKYLNWYQQKPGQAPRLLIYHTSRLHSGIPARFSGSGSGTDYTLTISSLQPEDFAVYFCQQGNTLPYTFGQGTKLEIKGGGGSGGGGSGGGGSGGGGSQVQLQESGPGLVKPSETLSLTCTVSGVSLPDYGVSWIRQPPGKGLEWIGVIWGSETTYYQSSLKSRVTISKDNSKNQVSLKLSSVTAADTAVYYCAKHYYYGGSYAMDYWGQGTLVTVSSTTTPAPRPPTPAPTIASQPLSLRPEACRPAAGGAVHTRGLDFACDIYIWAPLAGTCGVLLLSLVITLYCKRGRKKLLYIFKQPFMRPVQTTQEEDGCSCRFPEEEEGGCELRVKFSRSADAPAYQQGQNQLYNELNLGRREEYDVLDKRRGRDPEMGGKPRRKNPQEGLYNELQKDKMAEAYSEIGMKGERRRGKGHDGLYQGLSTATKDTYDALHMQALPPR

SEQ ID NO: 1332 - protein, 739 aa, synthetic construct
EIVMTQSPATLSLSPGERATLSCRASQDISKYLNWYQQKPGQAPRLLIYHTSRLHSGIPARFSGSGSGTDYTLTISSLQPEDFAVYFCQQGNTLPYTFGQGTKLEIKGGGGSGGGGSGGGGSGGGGSQVQLQESGPGLVKPSETLSLTCTVSGVSLPDYGVSWIRQPPGKGLEWIGVIWGSETTYYQSSLKSRVTISKDNSKNQVSLKLSSVTAADTAVYYCAKHYYYGGSYAMDYWGQGTLVTVSSGGGGSGGGGSGGGGSGGGGSDIQLTQSPSSLSASVGDRVTITCKASQSVDYEGDSFLNWYQQKPGKAPKLLIYAASNLESGVPSRFSGSGSGTDFTLTISSIQPEDFATYYCQQSNEDPLTFGQGTKVEIKRGGGGSGGGGSGGGGSGGGGSEVQLVESGGGLVQPGGSLRLSCAASGYTFSSYWIEWVRQAPGKGLEWIGEILPGGGDTNYNEIFKGRATFSADTSKNTAYLQMNSLRAEDTAVYYCTRRVPIRLDYWGQGTLVTVSSTTTPAPRPPTPAPTIASQPLSLRPEACRPAAGGAVHTRGLDFACDIYIWAPLAGTCGVLLLSLVITLYCKRGRKKLLYIFKQPFMRPVQTTQEEDGCSCRFPEEEEGGCELRVKFSRSADAPAYQQGQNQLYNELNLGRREEYDVLDKRRGRDPEMGGKPRRKNPQEGLYNELQKDKMAEAYSEIGMKGERRRGKGHDGLYQGLSTATKDTYDALHMQALPPR

SEQ ID NO: 1333 - protein, 739 aa, synthetic construct
DIQLTQSPSSLSASVGDRVTITCKASQSVDYEGDSFLNWYQQKPGKAPKLLIYAASNLESGVPSRFSGSGSGTDFTLTISSIQPEDFATYYCQQSNEDPLTFGQGTKVEIKRGGGGSGGGGSGGGGSGGGGSEVQLVESGGGLVQPGGSLRLSCAASGYTFSSYWIEWVRQAPGKGLEWIGEILPGGGDTNYNEIFKGRATFSADTSKNTAYLQMNSLRAEDTAVYYCTRRVPIRLDYWGQGTLVTVSSGGGGSGGGGSGGGGSGGGGSEIVMTQSPATLSLSPGERATLSCRASQDISKYLNWYQQKPGQAPRLLIYHTSRLHSGIPARFSGSGSGTDYTLTISSLQPEDFAVYFCQQGNTLPYTFGQGTKLEIKGGGGSGGGGSGGGGSGGGGSQVQLQESGPGLVKPSETLSLTCTVSGVSLPDYGVSWIRQPPGKGLEWIGVIWGSETTYYQSSLKSRVTISKDNSKNQVSLKLSSVTAADTAVYYCAKHYYYGGSYAMDYWGQGTLVTVSSTTTPAPRPPTPAPTIASQPLSLRPEACRPAAGGAVHTRGLDFACDIYIWAPLAGTCGVLLLSLVITLYCKRGRKKLLYIFKQPFMRPVQTTQEEDGCSCRFPEEEEGGCELRVKFSRSADAPAYQQGQNQLYNELNLGRREEYDVLDKRRGRDPEMGGKPRRKNPQEGLYNELQKDKMAEAYSEIGMKGERRRGKGHDGLYQGLSTATKDTYDALHMQALPPR

SEQ ID NO: 1334 - protein, 472 aa, synthetic construct
DIQLTQSPSSLSASVGDRVTITCKASQSVDYEGDSFLNWYQQKPGKAPKLLIYAASNLESGVPSRFSGSGSGTDFTLTISSIQPEDFATYYCQQSNEDPLTFGQGTKVEIKRGGGGSGGGGSGGGGSGGGGSEVQLVESGGGLVQPGGSLRLSCAASGYTFSSYWIEWVRQAPGKGLEWIGEILPGGGDTNYNEIFKGRATFSADTSKNTAYLQMNSLRAEDTAVYYCTRRVPIRLDYWGQGTLVTVSSTTTPAPRPPTPAPTIASQPLSLRPEACRPAAGGAVHTRGLDFACDIYIWAPLAGTCGVLLLSLVITLYCKRGRKKLLYIFKQPFMRPVQTTQEEDGCSCRFPEEEEGGCELRVKFSRSADAPAYQQGQNQLYNELNLGRREEYDVLDKRRGRDPEMGGKPRRKNPQEGLYNELQKDKMAEAYSEIGMKGERRRGKGHDGLYQGLSTATKDTYDALHMQALPPR

SEQ ID NO: 1335 - protein, 493 aa, synthetic construct
MALPVTALLLPLALLLHAARPEVQLVESGGGLVQPGGSLRLSCAASGYTFSSYWIEWVRQAPGKGLEWIGEILPGGGDTNYNEIFKGRATFSADTSKNTAYLQMNSLRAEDTAVYYCTRRVPIRLDYWGQGTLVTVSSGGGGSGGGGSGGGGSGGGGSDIQLTQSPSSLSASVGDRVTITCKASQSVDYEGDSFLNWYQQKPGKAPKLLIYAASNLESGVPSRFSGSGSGTDFTLTISSIQPEDFATYYCQQSNEDPLTFGQGTKVEIKRTTTPAPRPPTPAPTIASQPLSLRPEACRPAAGGAVHTRGLDFACDIYIWAPLAGTCGVLLLSLVITLYCKRGRKKLLYIFKQPFMRPVQTTQEEDGCSCRFPEEEEGGCELRVKFSRSADAPAYQQGQNQLYNELNLGRREEYDVLDKRRGRDPEMGGKPRRKNPQEGLYNELQKDKMAEAYSEIGMKGERRRGKGHDGLYQGLSTATKDTYDALHMQALPPR

SEQ ID NO: 1336 - protein, 380 aa, synthetic construct
MALPVTALLLPLALLLHAARPHSVLHLVPINATSKDDSDVTEVMWQPALRRGRGLQAQGYGVRIQDAGVYLLYSQVLFQDVTFTMGQVVSREGQGRQETLFRCIRSMPSHPDRAYNSCYSAGVFHLHQGDILSVIIPRARAKLNLSPHGTFLGFVKLTTTPAPRPPTPAPTIASQPLSLRPEACRPAAGGAVHTRGLDFACDIYIWAPLAGTCGVLLLSLVITLYCKRGRKKLLYIFKQPFMRPVQTTQEEDGCSCRFPEEEEGGCELRVKFSRSADAPAYQQGQNQLYNELNLGRREEYDVLDKRRGRDPEMGGKPRRKNPQEGLYNELQKDKMAEAYSEIGMKGERRRGKGHDGLYQGLSTATKDTYDALHMQALPPR

SEQ ID NO: 1337 - protein, 365 aa, synthetic construct
MALPVTALLLPLALLLHAARPHSVLHLVPINATSKDDSDVTEVMWQPALRRGRGLQAQGYGVRIQDAGVYLLYSQVLFQDVTFTMGQVVSREGQGRQETLFRCIRSMPSHPDRAYNSCYSAGVFHLHQGDILSVIIPRARAKLNLSPHGTFLGFVKLPSPADLSPGASSVTPPAPAREPGHSPQIISFFLALTSTALLFLLFFLTLRFSVVKRGRKKLLYIFKQPFMRPVQTTQEEDGCSCRFPEEEEGGCELRVKFSRSADAPAYQQGQNQLYNELNLGRREEYDVLDKRRGRDPEMGGKPRRKNPQEGLYNELQKDKMAEAYSEIGMKGERRRGKGHDGLYQGLSTATKDTYDALHMQALPPR

SEQ ID NO: 1338 - protein, 400 aa, synthetic construct
MALPVTALLLPLALLLHAARPHSVLHLVPINATSKDDSDVTEVMWQPALRRGRGLQAQGYGVRIQDAGVYLLYSQVLFQDVTFTMGQVVSREGQGRQETLFRCIRSMPSHPDRAYNSCYSAGVFHLHQGDILSVIIPRARAKLNLSPHGTFLGFVKLPSPADLSPGASSVTPPAPAREPGHSPQIISFFLALTSTALLFLLFFLTLRFSVVKRGRKKLLYIFKQPFMRPVQTTQEEDGCSCRFPEEEEGGCELRVKFSRSADAPAYQQGQNQLYNELNLGRREEYDVLDKRRGRDPEMGGKPRRKNPQEGLYNELQKDKMAEAYSEIGMKGERRRGKGHDGLYQDSHFQAVPVQEKKKRLRRAPWRAFAQPQRLKHRNNELPDSLEPIYKNIWNKTFIGE

SEQ ID NO: 1339 - protein, 488 aa, synthetic construct
MALPVTALLLPLALLLHAARPDIQMTQSPSSLSASVGDRVTITCRTSENVYSYLAWYQQKPGKAPKLLVSSAKTLAEGVPSRFSGSGSGTDFTLTISSLQPEDFATYFCQHHSDNPWTFGQGTKVEIKRGGGGSGGGGSGGGGSGGGGSAVQLVQSGAEVKKPGSSVKVSCKASGYSFTGYNMNWVRQAPGQGLEWMGNIDPYYGGTTYNRKFKGRVTLTVDKSSSTAYMELSSLRSEDTAVYYCARSVGPMDYWGQGTLVTVSSTTTPAPRPPTPAPTIASQPLSLRPEACRPAAGGAVHTRGLDFACDIYIWAPLAGTCGVLLLSLVITLYCKRGRKKLLYIFKQPFMRPVQTTQEEDGCSCRFPEEEEGGCELRVKFSRSADAPAYQQGQNQLYNELNLGRREEYDVLDKRRGRDPEMGGKPRRKNPQEGLYNELQKDKMAEAYSEIGMKGERRRGKGHDGLYQGLSTATKDTYDALHMQALPPR

SEQ ID NO: 1340 - protein, 488 aa, synthetic construct
MALPVTALLLPLALLLHAARPAVQLVQSGAEVKKPGSSVKVSCKASGYSFTGYNMNWVRQAPGQGLEWMGNIDPYYGGTTYNRKFKGRVTLTVDKSSSTAYMELSSLRSEDTAVYYCARSVGPMDYWGQGTLVTVSSGGGGSGGGGSGGGGSGGGGSDIQMTQSPSSLSASVGDRVTITCRTSENVYSYLAWYQQKPGKAPKLLVSSAKTLAEGVPSRFSGSGSGTDFTLTISSLQPEDFATYFCQHHSDNPWTFGQGTKVEIKRTTTPAPRPPTPAPTIASQPLSLRPEACRPAAGGAVHTRGLDFACDIYIWAPLAGTCGVLLLSLVITLYCKRGRKKLLYIFKQPFMRPVQTTQEEDGCSCRFPEEEEGGCELRVKFSRSADAPAYQQGQNQLYNELNLGRREEYDVLDKRRGRDPEMGGKPRRKNPQEGLYNELQKDKMAEAYSEIGMKGERRRGKGHDGLYQGLSTATKDTYDALHMQALPPR

SEQ ID NO: 1341 - protein, 755 aa, synthetic construct
MALPVTALLLPLALLLHAARPEIVMTQSPATLSLSPGERATLSCRASQDISKYLNWYQQKPGQAPRLLIYHTSRLHSGIPARFSGSGSGTDYTLTISSLQPEDFAVYFCQQGNTLPYTFGQGTKLEIKGGGGSGGGGSGGGGSGGGGSQVQLQESGPGLVKPSETLSLTCTVSGVSLPDYGVSWIRQPPGKGLEWIGVIWGSETTYYQSSLKSRVTISKDNSKNQVSLKLSSVTAADTAVYYCAKHYYYGGSYAMDYWGQGTLVTVSSGGGGSGGGGSGGGGSGGGGSAVQLVQSGAEVKKPGSSVKVSCKASGYSFTGYNMNWVRQAPGQGLEWMGNIDPYYGGTTYNRKFKGRVTLTVDKSSSTAYMELSSLRSEDTAVYYCARSVGPMDYWGQGTLVTVSSGGGGSGGGGSGGGGSGGGGSDIQMTQSPSSLSASVGDRVTITCRTSENVYSYLAWYQQKPGKAPKLLVSSAKTLAEGVPSRFSGSGSGTDFTLTISSLQPEDFATYFCQHHSDNPWTFGQGTKVEIKRTTTPAPRPPTPAPTIASQPLSLRPEACRPAAGGAVHTRGLDFACDIYIWAPLAGTCGVLLLSLVITLYCKRGRKKLLYIFKQPFMRPVQTTQEEDGCSCRFPEEEEGGCELRVKFSRSADAPAYQQGQNQLYNELNLGRREEYDVLDKRRGRDPEMGGKPRRKNPQEGLYNELQKDKMAEAYSEIGMKGERRRGKGHDGLYQGLSTATKDTYDALHMQALPPR

SEQ ID NO: 1342 - protein, 755 aa, synthetic construct
MALPVTALLLPLALLLHAARPAVQLVQSGAEVKKPGSSVKVSCKASGYSFTGYNMNWVRQAPGQGLEWMGNIDPYYGGTTYNRKFKGRVTLTVDKSSSTAYMELSSLRSEDTAVYYCARSVGPMDYWGQGTLVTVSSGGGGSGGGGSGGGGSGGGGSDIQMTQSPSSLSASVGDRVTITCRTSENVYSYLAWYQQKPGKAPKLLVSSAKTLAEGVPSRFSGSGSGTDFTLTISSLQPEDFATYFCQHHSDNPWTFGQGTKVEIKRGGGGSGGGGSGGGGSGGGGSEIVMTQSPATLSLSPGERATLSCRASQDISKYLNWYQQKPGQAPRLLIYHTSRLHSGIPARFSGSGSGTDYTLTISSLQPEDFAVYFCQQGNTLPYTFGQGTKLEIKGGGGSGGGGSGGGGSGGGGSQVQLQESGPGLVKPSETLSLTCTVSGVSLPDYGVSWIRQPPGKGLEWIGVIWGSETTYYQSSLKSRVTISKDNSKNQVSLKLSSVTAADTAVYYCAKHYYYGGSYAMDYWGQGTLVTVSSTTTPAPRPPTPAPTIASQPLSLRPEACRPAAGGAVHTRGLDFACDIYIWAPLAGTCGVLLLSLVITLYCKRGRKKLLYIFKQPFMRPVQTTQEEDGCSCRFPEEEEGGCELRVKFSRSADAPAYQQGQNQLYNELNLGRREEYDVLDKRRGRDPEMGGKPRRKNPQEGLYNELQKDKMAEAYSEIGMKGERRRGKGHDGLYQGLSTATKDTYDALHMQALPPR

SEQ ID NO: 1343 - protein, 496 aa, synthetic construct
MALPVTALLLPLALLLHAARPEVRLQQSGPDLIKPGASVKMSCKASGYTFTGYVMHWVKQRPGQGLEWIGFINPYNDDIQSNERFRGKATLTSDKSSTTAYMELSSLTSEDSAVYYCARGAGYNFDGAYRFFDFWGQGTTLTVSSGGGGSGGGGSGGGGSDVVMTQSPLSLPVSLGDQASISCRSSQRLVHSNGNTYLHWYLQKPGQSPKLLIYRVSNRFPGVPDRFSGSGSGTDFTLKISRVEAEDLGIYFCSQSTHVPYTFGGGTKLEIKRTTTPAPRPPTPAPTIASQPLSLRPEACRPAAGGAVHTRGLDFACDIYIWAPLAGTCGVLLLSLVITLYCKRGRKKLLYIFKQPFMRPVQTTQEEDGCSCRFPEEEEGGCELRVKFSRSADAPAYQQGQNQLYNELNLGRREEYDVLDKRRGRDPEMGGKPRRKNPQEGLYNELQKDKMAEAYSEIGMKGERRRGKGHDGLYQGLSTATKDTYDALHMQALPPR

SEQ ID NO: 1344 - protein, 493 aa, synthetic construct
MALPVTALLLPLALLLHAARPQVQLVESGGGLVKPGGSLRLSCAASGFTFSDYYMSWIRQAPGKGLEWVSYISSSGSTIYYADSVEGRFTISRDNAKNSLYLQMNSLRTEDTAVYYCARARVGGMDVWGQGTMVTVSSGGGGSGGGGSGGGASNFMLTQPHSVSESPGKTVTISCTRSSGSIASNYVQWYQQRPGSSPTTVIYEDNQRPSGVPDRFSGSIDSSSNSASLTISGLKTEDEADYYCQSFDADNLHVVFGGGTKLTVLGQPAATTTPAPRPPTPAPTIASQPLSLRPEACRPAAGGAVHTRGLDFACDIYIWAPLAGTCGVLLLSLVITLYCKRGRKKLLYIFKQPFMRPVQTTQEEDGCSCRFPEEEEGGCELRVKFSRSADAPAYQQGQNQLYNELNLGRREEYDVLDKRRGRDPEMGGKPRRKNPQEGLYNELQKDKMAEAYSEIGMKGERRRGKGHDGLYQGLSTATKDTYDALHMQALPPR

SEQ ID NO: 1345 - protein, 655 aa, synthetic construct
HSVLHLVPINATSKDDSDVTEVMWQPALRRGRGLQAQGYGVRIQDAGVYLLYSQVLFQDVTFTMGQVVSREGQGRQETLFRCIRSMPSHPDRAYNSCYSAGVFHLHQGDILSVIIPRARAKLNLSPHGTFLGFVKLGGGSGGGSGGGSHSVLHLVPINATSKDDSDVTEVMWQPALRRGRGLQAQGYGVRIQDAGVYLLYSQVLFQDVTFTMGQVVSREGQGRQETLFRCIRSMPSHPDRAYNSCYSAGVFHLHQGDILSVIIPRARAKLNLSPHGTFLGFVKLGGGSGGGSGGGSHSVLHLVPINATSKDDSDVTEVMWQPALRRGRGLQAQGYGVRIQDAGVYLLYSQVLFQDVTFTMGQVVSREGQGRQETLFRCIRSMPSHPDRAYNSCYSAGVFHLHQGDILSVIIPRARAKLNLSPHGTFLGFVKLTTTPAPRPPTPAPTIASQPLSLRPEACRPAAGGAVHTRGLDFACDIYIWAPLAGTCGVLLLSLVITLYCKRGRKKLLYIFKQPFMRPVQTTQEEDGCSCRFPEEEEGGCELRVKFSRSADAPAYQQGQNQLYNELNLGRREEYDVLDKRRGRDPEMGGKPRRKNPQEGLYNELQKDKMAEAYSEIGMKGERRRGKGHDGLYQGLSTATKDTYDALHMQALPPR

SEQ ID NO: 1346 - protein, 667 aa, synthetic construct
HSVLHLVPINATSKDDSDVTEVMWQPALRRGRGLQAQGYGVRIQDAGVYLLYSQVLFQDVTFTMGQVVSREGQGRQETLFRCIRSMPSHPDRAYNSCYSAGVFHLHQGDILSVIIPRARAKLNLSPHGTFLGFVKLGSTSGSGKPGSGEGSTKGHSVLHLVPINATSKDDSDVTEVMWQPALRRGRGLQAQGYGVRIQDAGVYLLYSQVLFQDVTFTMGQVVSREGQGRQETLFRCIRSMPSHPDRAYNSCYSAGVFHLHQGDILSVIIPRARAKLNLSPHGTFLGFVKLGSTSGSGKPGSGEGSTKGHSVLHLVPINATSKDDSDVTEVMWQPALRRGRGLQAQGYGVRIQDAGVYLLYSQVLFQDVTFTMGQVVSREGQGRQETLFRCIRSMPSHPDRAYNSCYSAGVFHLHQGDILSVIIPRARAKLNLSPHGTFLGFVKLTTTPAPRPPTPAPTIASQPLSLRPEACRPAAGGAVHTRGLDFACDIYIWAPLAGTCGVLLLSLVITLYCKRGRKKLLYIFKQPFMRPVQTTQEEDGCSCRFPEEEEGGCELRVKFSRSADAPAYQQGQNQLYNELNLGRREEYDVLDKRRGRDPEMGGKPRRKNPQEGLYNELQKDKMAEAYSEIGMKGERRRGKGHDGLYQGLSTATKDTYDALHMQALPPR

SEQ ID NO: 1347 - protein, 466 aa, synthetic construct
EIQLQQSGAELVKPGASVKLSCTGSGFNIEDYYIHWVKQRTEQGLEWIGRIDPENDETKYGPIFQGRATITADTSSNTVYLQLSSLTSEDTAVYYCAFRGGVYWGPGTTLTVSSGGGGSGGGGSGGGGSHMDVVMTQSPLTLSVAIGQSASISCKSSQSLLDSDGKTYLNWLLQRPGQSPKRLISLVSKLDSGVPDRFTGSGSGTDFTLRISRVEAEDLGIYYCWQGTHFPGTFGGGTKLEIKTTTPAPRPPTPAPTIASQPLSLRPEACRPAAGGAVHTRGLDFACDIYIWAPLAGTCGVLLLSLVITLYCKRGRKKLLYIFKQPFMRPVQTTQEEDGCSCRFPEEEEGGCELRVKFSRSADAPAYQQGQNQLYNELNLGRREEYDVLDKRRGRDPEMGGKPRRKNPQEGLYNELQKDKMAEAYSEIGMKGERRRGKGHDGLYQGLSTATKDTYDALHMQALPPR

SEQ ID NO: 1348 - protein, 469 aa, synthetic construct
EIQLVQSGAEVKKPGESLRISCKGSGFNIEDYYIHWVRQMPGKGLEWMGRIDPENDETKYGPIFQGHVTISADTSINTVYLQWSSLKASDTAMYYCAFRGGVYWGQGTTVTVSSGGGGSGGGGSGGGGSGGGGSDVVMTQSPDSLAVSLGERATINCKSSQSLLDSDGKTYLNWLQQKPGQPPKRLISLVSKLDSGVPDRFSGSGSGTDFTLTISSLQAEDVAVYYCWQGTHFPGTFGGGTKVEIKTTTPAPRPPTPAPTIASQPLSLRPEACRPAAGGAVHTRGLDFACDIYIWAPLAGTCGVLLLSLVITLYCKRGRKKLLYIFKQPFMRPVQTTQEEDGCSCRFPEEEEGGCELRVKFSRSADAPAYQQGQNQLYNELNLGRREEYDVLDKRRGRDPEMGGKPRRKNPQEGLYNELQKDKMAEAYSEIGMKGERRRGKGHDGLYQGLSTATKDTYDALHMQALPPR

SEQ ID NO: 1349 - protein, 346 aa, synthetic construct
ATPAPKSCPERHYWAQGKLCCQMCEPGTFLVKDCDQHRKAAQCDPCIPGVSFSPDHHTRPHCESCRHCNSGLLVRNCTITANAECACRNGWQCRDKECTECDPLPNPSLTARSSQALSPHPQPTHLPYVSEMLEARTAGHMQTLADFRQLPARTLSTHWPPQRSLCSSDFIRILVIFSGMFLVFTLAGALFLKRGRKKLLYIFKQPFMRPVQTTQEEDGCSCRFPEEEEGGCELRVKFSRSADAPAYQQGQNQLYNELNLGRREEYDVLDKRRGRDPEMGGKPRRKNPQEGLYNELQKDKMAEAYSEIGMKGERRRGKGHDGLYQGLSTATKDTYDALHMQALPPR

SEQ ID NO: 1350 - protein, 356 aa, synthetic construct
EQKLISEEDLATPAPKSCPERHYWAQGKLCCQMCEPGTFLVKDCDQHRKAAQCDPCIPGVSFSPDHHTRPHCESCRHCNSGLLVRNCTITANAECACRNGWQCRDKECTECDPLPNPSLTARSSQALSPHPQPTHLPYVSEMLEARTAGHMQTLADFRQLPARTLSTHWPPQRSLCSSDFIRILVIFSGMFLVFTLAGALFLKRGRKKLLYIFKQPFMRPVQTTQEEDGCSCRFPEEEEGGCELRVKFSRSADAPAYQQGQNQLYNELNLGRREEYDVLDKRRGRDPEMGGKPRRKNPQEGLYNELQKDKMAEAYSEIGMKGERRRGKGHDGLYQGLSTATKDTYDALHMQALPPR

SEQ ID NO: 1351 - protein, 325 aa, synthetic construct
ATPAPKSCPERHYWAQGKLCCQMCEPGTFLVKDCDQHRKAAQCDPCIPGVSFSPDHHTRPHCESCRHCNSGLLVRNCTITANAECACRNGWQCRDKECTECDTTTPAPRPPTPAPTIASQPLSLRPEACRPAAGGAVHTRGLDFACDIYIWAPLAGTCGVLLLSLVITLYCKRGRKKLLYIFKQPFMRPVQTTQEEDGCSCRFPEEEEGGCELRVKFSRSADAPAYQQGQNQLYNELNLGRREEYDVLDKRRGRDPEMGGKPRRKNPQEGLYNELQKDKMAEAYSEIGMKGERRRGKGHDGLYQGLSTATKDTYDALHMQALPPR

SEQ ID NO: 1352 - protein, 344 aa, synthetic construct
ATPAPKSCPERHYWAQGKLCCQMCEPGTFLVKDCDQHRKAAQCDPCIPGVSFSPDHHTRPHCESCRHCNSGLLVRNCTITANAECACRNGWQCRDKECTECDGGGSGGGSGGGSGGGSGGGSGGGSGGGSGGGSGGGSGGGSGGGSGGGSGGGSGGGSGGGSGGGSGGGSILVIFSGMFLVFTLAGALFLKRGRKKLLYIFKQPFMRPVQTTQEEDGCSCRFPEEEEGGCELRVKFSRSADAPAYQQGQNQLYNELNLGRREEYDVLDKRRGRDPEMGGKPRRKNPQEGLYNELQKDKMAEAYSEIGMKGERRRGKGHDGLYQGLSTATKDTYDALHMQALPPR

SEQ ID NO: 1353 - protein, 303 aa, synthetic construct
ATPAPKSCPERHYWAQGKLCCQMCEPGTFLVKDCDQHRKAAQCDPCIPGVSFSPDHHTRPHCESCRHCNSGLLVRNCTITANAECACRNGWQCRDKECTECDPLPNPSLTARSSLCSSDFIRILVIFSGMFLVFTLAGALFLKRGRKKLLYIFKQPFMRPVQTTQEEDGCSCRFPEEEEGGCELRVKFSRSADAPAYQQGQNQLYNELNLGRREEYDVLDKRRGRDPEMGGKPRRKNPQEGLYNELQKDKMAEAYSEIGMKGERRRGKGHDGLYQGLSTATKDTYDALHMQALPPRSEQIDNO

SEQ ID NO: 1354 - protein, 276 aa, synthetic construct
ATPAPKSCPERHYWAQGKLCCQMCEPGTFLVKDCDQHRKAAQCDPCIPGVSFSPDHHTRPHCESCRHCNSGLLVRNCTITANAECACRNGWQCRDKECTECDILVIFSGMFLVFTLAGALFLKRGRKKLLYIFKQPFMRPVQTTQEEDGCSCRFPEEEEGGCELRVKFSRSADAPAYQQGQNQLYNELNLGRREEYDVLDKRRGRDPEMGGKPRRKNPQEGLYNELQKDKMAEAYSEIGMKGERRRGKGHDGLYQGLSTATKDTYDALHMQALPPR

SEQ ID NO: 1355 - protein, 507 aa, synthetic construct
MALPVTALLLPLALLLHAARPDIVLTQSPPSLAMSLGKRATISCRASESVTILGSHLIHWYQQKPGQPPTLLIQLASNVQTGVPARFSGSGSRTDFTLTIDPVEEDDVAVYYCLQSRTIPRTFGGGTKLEIKGSTSGSGKPGSGEGSTKGQIQLVQSGPELKKPGETVKISCKASGYTFTDYSINWVKRAPGKGLKWMGWINTETREPAYAYDFRGRFAFSLETSASTAYLQINNLKYEDTATYFCALDYSYAMDYWGQGTSVTVSSAAATTTPAPRPPTPAPTTTTPAPRPPTPAPTIASQPLSLRPEACRPAAGGAVHTRGLDFACDIYIWAPLAGTCGVLLLSLVITLYCKRGRKKLLYIFKQPFMRPVQTTQEEDGCSCRFPEEEEGGCELRVKFSRSADAPAYQQGQNQLYNELNLGRREEYDVLDKRRGRDPEMGGKPRRKNPQEGLYNELQKDKMAEAYSEIGMKGERRRGKGHDGLYQGLSTATKDTYDALHMQALPPR

SEQ ID NO: 1356 - protein, 471 aa, synthetic construct
EVQLQQSGPELVKPGASVKISCKTSGYTFTESTIHWVKQSHGKSLEWIGGISPNNGGSPFNQKFKGKATLTVDKSSSTVYMELRSLSSEDSAVYYCAKWVRGAMDFWGQGTSVTVSSGGGGSGGGGSGGGGSGGGGSDIVLTQSPASLAVSLGQRATISCRASESVDYYGMSLMNWFQQKPGQPPKLVIYAASNQGSGVPARFSGSGSGTDFRLNIHPLEEDDTGMYFCQQSKEAPPTFGGGTKLEIKTTTPAPRPPTPAPTIASQPLSLRPEACRPAAGGAVHTRGLDFACDIYIWAPLAGTCGVLLLSLVITLYCKRGRKKLLYIFKQPFMRPVQTTQEEDGCSCRFPEEEEGGCELRVKFSRSADAPAYQQGQNQLYNELNLGRREEYDVLDKRRGRDPEMGGKPRRKNPQEGLYNELQKDKMAEAYSEIGMKGERRRGKGHDGLYQGLSTATKDTYDALHMQALPPR

SEQ ID NO: 1357 - protein, 471 aa, synthetic construct
DIVLTQSPASLAVSLGQRATISCRASESVDYYGMSLMNWFQQKPGQPPKLVIYAASNQGSGVPARFSGSGSGTDFRLNIHPLEEDDTGMYFCQQSKEAPPTFGGGTKLEIKGGGGSGGGGSGGGGSGGGGSEVQLQQSGPELVKPGASVKISCKTSGYTFTESTIHWVKQSHGKSLEWIGGISPNNGGSPFNQKFKGKATLTVDKSSSTVYMELRSLSSEDSAVYYCAKWVRGAMDFWGQGTSVTVSSTTTPAPRPPTPAPTIASQPLSLRPEACRPAAGGAVHTRGLDFACDIYIWAPLAGTCGVLLLSLVITLYCKRGRKKLLYIFKQPFMRPVQTTQEEDGCSCRFPEEEEGGCELRVKFSRSADAPAYQQGQNQLYNELNLGRREEYDVLDKRRGRDPEMGGKPRRKNPQEGLYNELQKDKMAEAYSEIGMKGERRRGKGHDGLYQGLSTATKDTYDALHMQALPPR

SEQ ID NO: 1358 - protein, 775 aa, synthetic construct
MALPVTALLLPLALLLHAARPEVQLQQSGPELVKPGASVKISCKTSGYTFTESTIHWVKQSHGKSLEWIGGISPNNGGSPFNQKFKGKATLTVDKSSSTVYMELRSLSSEDSAVYYCAKWVRGAMDFWGQGTSVTVSSGGGGSGGGGSGGGGSGGGGSDIVLTQSPASLAVSLGQRATISCRASESVDYYGMSLMNWFQQKPGQPPKLVIYAASNQGSGVPARFSGSGSGTDFRLNIHPLEEDDTGMYFCQQSKEAPPTFGGGTKLEIKGGGGSGGGGSGGGGSGGGGSDIVLTQSPPSLAMSLGKRATISCRASESVTILGSHLIHWYQQKPGQPPTLLIQLASNVQTGVPARFSGSGSRTDFTLTIDPVEEDDVAVYYCLQSRTIPRTFGGGTKLEIKGSTSGSGKPGSGEGSTKGQIQLVQSGPELKKPGETVKISCKASGYTFTDYSINWVKRAPGKGLKWMGWINTETREPAYAYDFRGRFAFSLETSASTAYLQINNLKYEDTATYFCALDYSYAMDYWGQGTSVTVSSAAATTTPAPRPPTPAPTTTTPAPRPPTPAPTIASQPLSLRPEACRPAAGGAVHTRGLDFACDIYIWAPLAGTCGVLLLSLVITLYCKRGRKKLLYIFKQPFMRPVQTTQEEDGCSCRFPEEEEGGCELRVKFSRSADAPAYQQGQNQLYNELNLGRREEYDVLDKRRGRDPEMGGKPRRKNPQEGLYNELQKDKMAEAYSEIGMKGERRRGKGHDGLYQGLSTATKDTYDALHMQALPPR

SEQ ID NO: 1359 - protein, 775 aa, synthetic construct
MALPVTALLLPLALLLHAARPDIVLTQSPPSLAMSLGKRATISCRASESVTILGSHLIHWYQQKPGQPPTLLIQLASNVQTGVPARFSGSGSRTDFTLTIDPVEEDDVAVYYCLQSRTIPRTFGGGTKLEIKGSTSGSGKPGSGEGSTKGQIQLVQSGPELKKPGETVKISCKASGYTFTDYSINWVKRAPGKGLKWMGWINTETREPAYAYDFRGRFAFSLETSASTAYLQINNLKYEDTATYFCALDYSYAMDYWGQGTSVTVSSAAATTTPAPRPPTPAPTGGGGSGGGGSGGGGSGGGGSEVQLQQSGPELVKPGASVKISCKTSGYTFTESTIHWVKQSHGKSLEWIGGISPNNGGSPFNQKFKGKATLTVDKSSSTVYMELRSLSSEDSAVYYCAKWVRGAMDFWGQGTSVTVSSGGGGSGGGGSGGGGSGGGGSDIVLTQSPASLAVSLGQRATISCRASESVDYYGMSLMNWFQQKPGQPPKLVIYAASNQGSGVPARFSGSGSGTDFRLNIHPLEEDDTGMYFCQQSKEAPPTFGGGTKLEIKTTTPAPRPPTPAPTIASQPLSLRPEACRPAAGGAVHTRGLDFACDIYIWAPLAGTCGVLLLSLVITLYCKRGRKKLLYIFKQPFMRPVQTTQEEDGCSCRFPEEEEGGCELRVKFSRSADAPAYQQGQNQLYNELNLGRREEYDVLDKRRGRDPEMGGKPRRKNPQEGLYNELQKDKMAEAYSEIGMKGERRRGKGHDGLYQGLSTATKDTYDALHMQALPPR

SEQ ID NO: 1360 - protein, 775 aa, synthetic construct
MALPVTALLLPLALLLHAARPDIVLTQSPASLAVSLGQRATISCRASESVDYYGMSLMNWFQQKPGQPPKLVIYAASNQGSGVPARFSGSGSGTDFRLNIHPLEEDDTGMYFCQQSKEAPPTFGGGTKLEIKGGGGSGGGGSGGGGSGGGGSEVQLQQSGPELVKPGASVKISCKTSGYTFTESTIHWVKQSHGKSLEWIGGISPNNGGSPFNQKFKGKATLTVDKSSSTVYMELRSLSSEDSAVYYCAKWVRGAMDFWGQGTSVTVSSGGGGSGGGGSGGGGSGGGGSDIVLTQSPPSLAMSLGKRATISCRASESVTILGSHLIHWYQQKPGQPPTLLIQLASNVQTGVPARFSGSGSRTDFTLTIDPVEEDDVAVYYCLQSRTIPRTFGGGTKLEIKGSTSGSGKPGSGEGSTKGQIQLVQSGPELKKPGETVKISCKASGYTFTDYSINWVKRAPGKGLKWMGWINTETREPAYAYDFRGRFAFSLETSASTAYLQINNLKYEDTATYFCALDYSYAMDYWGQGTSVTVSSAAATTTPAPRPPTPAPTTTTPAPRPPTPAPTIASQPLSLRPEACRPAAGGAVHTRGLDFACDIYIWAPLAGTCGVLLLSLVITLYCKRGRKKLLYIFKQPFMRPVQTTQEEDGCSCRFPEEEEGGCELRVKFSRSADAPAYQQGQNQLYNELNLGRREEYDVLDKRRGRDPEMGGKPRRKNPQEGLYNELQKDKMAEAYSEIGMKGERRRGKGHDGLYQGLSTATKDTYDALHMQALPPR

SEQ ID NO: 1361 - protein, 775 aa, synthetic construct
MALPVTALLLPLALLLHAARPDIVLTQSPPSLAMSLGKRATISCRASESVTILGSHLIHWYQQKPGQPPTLLIQLASNVQTGVPARFSGSGSRTDFTLTIDPVEEDDVAVYYCLQSRTIPRTFGGGTKLEIKGSTSGSGKPGSGEGSTKGQIQLVQSGPELKKPGETVKISCKASGYTFTDYSINWVKRAPGKGLKWMGWINTETREPAYAYDFRGRFAFSLETSASTAYLQINNLKYEDTATYFCALDYSYAMDYWGQGTSVTVSSAAATTTPAPRPPTPAPTGGGGSGGGGSGGGGSGGGGSDIVLTQSPASLAVSLGQRATISCRASESVDYYGMSLMNWFQQKPGQPPKLVIYAASNQGSGVPARFSGSGSGTDFRLNIHPLEEDDTGMYFCQQSKEAPPTFGGGTKLEIKGGGGSGGGGSGGGGSGGGGSEVQLQQSGPELVKPGASVKISCKTSGYTFTESTIHWVKQSHGKSLEWIGGISPNNGGSPFNQKFKGKATLTVDKSSSTVYMELRSLSSEDSAVYYCAKWVRGAMDFWGQGTSVTVSSTTTPAPRPPTPAPTIASQPLSLRPEACRPAAGGAVHTRGLDFACDIYIWAPLAGTCGVLLLSLVITLYCKRGRKKLLYIFKQPFMRPVQTTQEEDGCSCRFPEEEEGGCELRVKFSRSADAPAYQQGQNQLYNELNLGRREEYDVLDKRRGRDPEMGGKPRRKNPQEGLYNELQKDKMAEAYSEIGMKGERRRGKGHDGLYQGLSTATKDTYDALHMQALPPR

SEQ ID NO: 1362 - protein, 761 aa, synthetic construct
MALPVTALLLPLALLLHAARPEVQLQQSGPELVKPGASVKISCKTSGYTFTESTIHWVKQSHGKSLEWIGGISPNNGGSPFNQKFKGKATLTVDKSSSTVYMELRSLSSEDSAVYYCAKWVRGAMDFWGQGTSVTVSSGGGGSGGGGSGGGGSGGGGSDIVLTQSPASLAVSLGQRATISCRASESVDYYGMSLMNWFQQKPGQPPKLVIYAASNQGSGVPARFSGSGSGTDFRLNIHPLEEDDTGMYFCQQSKEAPPTFGGGTKLEIKGGGGSGGGGSGGGGSGGGGSDIVLTQSPPSLAMSLGKRATISCRASESVTILGSHLIHWYQQKPGQPPTLLIQLASNVQTGVPARFSGSGSRTDFTLTIDPVEEDDVAVYYCLQSRTIPRTFGGGTKLEIKGSTSGSGKPGSGEGSTKGQIQLVQSGPELKKPGETVKISCKASGYTFTDYSINWVKRAPGKGLKWMGWINTETREPAYAYDFRGRFAFSLETSASTAYLQINNLKYEDTATYFCALDYSYAMDYWGQGTSVTVSSAAATTTPAPRPPTPAPTIASQPLSLRPEACRPAAGGAVHTRGLDFACDIYIWAPLAGTCGVLLLSLVITLYCKRGRKKLLYIFKQPFMRPVQTTQEEDGCSCRFPEEEEGGCELRVKFSRSADAPAYQQGQNQLYNELNLGRREEYDVLDKRRGRDPEMGGKPRRKNPQEGLYNELQKDKMAEAYSEIGMKGERRRGKGHDGLYQGLSTATKDTYDALHMQALPPR

SEQ ID NO: 1363 - protein, 761 aa, synthetic construct
MALPVTALLLPLALLLHAARPDIVLTQSPPSLAMSLGKRATISCRASESVTILGSHLIHWYQQKPGQPPTLLIQLASNVQTGVPARFSGSGSRTDFTLTIDPVEEDDVAVYYCLQSRTIPRTFGGGTKLEIKGSTSGSGKPGSGEGSTKGQIQLVQSGPELKKPGETVKISCKASGYTFTDYSINWVKRAPGKGLKWMGWINTETREPAYAYDFRGRFAFSLETSASTAYLQINNLKYEDTATYFCALDYSYAMDYWGQGTSVTVSSAAAGGGGSGGGGSGGGGSGGGGSEVQLQQSGPELVKPGASVKISCKTSGYTFTESTIHWVKQSHGKSLEWIGGISPNNGGSPFNQKFKGKATLTVDKSSSTVYMELRSLSSEDSAVYYCAKWVRGAMDFWGQGTSVTVSSGGGGSGGGGSGGGGSGGGGSDIVLTQSPASLAVSLGQRATISCRASESVDYYGMSLMNWFQQKPGQPPKLVIYAASNQGSGVPARFSGSGSGTDFRLNIHPLEEDDTGMYFCQQSKEAPPTFGGGTKLEIKTTTPAPRPPTPAPTIASQPLSLRPEACRPAAGGAVHTRGLDFACDIYIWAPLAGTCGVLLLSLVITLYCKRGRKKLLYIFKQPFMRPVQTTQEEDGCSCRFPEEEEGGCELRVKFSRSADAPAYQQGQNQLYNELNLGRREEYDVLDKRRGRDPEMGGKPRRKNPQEGLYNELQKDKMAEAYSEIGMKGERRRGKGHDGLYQGLSTATKDTYDALHMQALPPR

SEQ ID NO: 1364 - protein, 761 aa, synthetic construct
MALPVTALLLPLALLLHAARPDIVLTQSPASLAVSLGQRATISCRASESVDYYGMSLMNWFQQKPGQPPKLVIYAASNQGSGVPARFSGSGSGTDFRLNIHPLEEDDTGMYFCQQSKEAPPTFGGGTKLEIKGGGGSGGGGSGGGGSGGGGSEVQLQQSGPELVKPGASVKISCKTSGYTFTESTIHWVKQSHGKSLEWIGGISPNNGGSPFNQKFKGKATLTVDKSSSTVYMELRSLSSEDSAVYYCAKWVRGAMDFWGQGTSVTVSSGGGGSGGGGSGGGGSGGGGSDIVLTQSPPSLAMSLGKRATISCRASESVTILGSHLIHWYQQKPGQPPTLLIQLASNVQTGVPARFSGSGSRTDFTLTIDPVEEDDVAVYYCLQSRTIPRTFGGGTKLEIKGSTSGSGKPGSGEGSTKGQIQLVQSGPELKKPGETVKISCKASGYTFTDYSINWVKRAPGKGLKWMGWINTETREPAYAYDFRGRFAFSLETSASTAYLQINNLKYEDTATYFCALDYSYAMDYWGQGTSVTVSSAAATTTPAPRPPTPAPTIASQPLSLRPEACRPAAGGAVHTRGLDFACDIYIWAPLAGTCGVLLLSLVITLYCKRGRKKLLYIFKQPFMRPVQTTQEEDGCSCRFPEEEEGGCELRVKFSRSADAPAYQQGQNQLYNELNLGRREEYDVLDKRRGRDPEMGGKPRRKNPQEGLYNELQKDKMAEAYSEIGMKGERRRGKGHDGLYQGLSTATKDTYDALHMQALPPR

SEQ ID NO: 1365 - protein, 761 aa, synthetic construct
MALPVTALLLPLALLLHAARPDIVLTQSPPSLAMSLGKRATISCRASESVTILGSHLIHWYQQKPGQPPTLLIQLASNVQTGVPARFSGSGSRTDFTLTIDPVEEDDVAVYYCLQSRTIPRTFGGGTKLEIKGSTSGSGKPGSGEGSTKGQIQLVQSGPELKKPGETVKISCKASGYTFTDYSINWVKRAPGKGLKWMGWINTETREPAYAYDFRGRFAFSLETSASTAYLQINNLKYEDTATYFCALDYSYAMDYWGQGTSVTVSSAAAGGGGSGGGGSGGGGSGGGGSDIVLTQSPASLAVSLGQRATISCRASESVDYYGMSLMNWFQQKPGQPPKLVIYAASNQGSGVPARFSGSGSGTDFRLNIHPLEEDDTGMYFCQQSKEAPPTFGGGTKLEIKGGGGSGGGGSGGGGSGGGGSEVQLQQSGPELVKPGASVKISCKTSGYTFTESTIHWVKQSHGKSLEWIGGISPNNGGSPFNQKFKGKATLTVDKSSSTVYMELRSLSSEDSAVYYCAKWVRGAMDFWGQGTSVTVSSTTTPAPRPPTPAPTIASQPLSLRPEACRPAAGGAVHTRGLDFACDIYIWAPLAGTCGVLLLSLVITLYCKRGRKKLLYIFKQPFMRPVQTTQEEDGCSCRFPEEEEGGCELRVKFSRSADAPAYQQGQNQLYNELNLGRREEYDVLDKRRGRDPEMGGKPRRKNPQEGLYNELQKDKMAEAYSEIGMKGERRRGKGHDGLYQGLSTATKDTYDALHMQALPPR

SEQ ID NO: 1366 - protein, 507 aa, synthetic construct
MALPVTALLLPLALLLHAARPEVKLQESGPGLVAPSQSLSVTCTVSGVSLPDYGVSWIRQPPRKGLEWLGVIWGSETTYYNSALKSRLTIIKDNSKSQVFLKMNSLQTDDTAIYYCAKHYYYGGSYAMDYWGQGTSVTVSSGGGGSGGGGSGGGGSGGGGSDIQMTQTTSSLSASLGDRVTISCRASQDISKYLNWYQQKPDGTVKLLIYHTSRLHSGVPSRFSGSGSGTDYSLTISNLEQEDIATYFCQQGNTLPYTFGGGTKLEITRADAAPTVSIFPPSSNTTTPAPRPPTPAPTIASQPLSLRPEACRPAAGGAVHTRGLDFACDIYIWAPLAGTCGVLLLSLVITLYCKRGRKKLLYIFKQPFMRPVQTTQEEDGCSCRFPEEEEGGCELRVKFSRSADAPAYQQGQNQLYNELNLGRREEYDVLDKRRGRDPEMGGKPRRKNPQEGLYNELQKDKMAEAYSEIGMKGERRRGKGHDGLYQGLSTATKDTYDALHMQALPPR

SEQ ID NO: 1367 - protein, 137 aa, synthetic construct
MECNWILPFILSVTSGVYSEILLQQTGTVLARPGTSVKMSCKASGYTFTNYRMHWVKQRPGQGLEWIGGIYPGNSDTNYNQKFKDKAKLTAVTSTSTANMELSSLTNEDSAVYYCLRGIRGSYFDYWGQGTTLTVSS

SEQ ID NO: 1368 - protein, 131 aa, synthetic construct
METDTILLWVLLLWVPGSTGDIVLTQSPASLAVSLGQRATISCKASQSVDYDGDSYMNWYQQKPGQPPKLLIYAASNLESGIPARFSGSGSGTDFTLNIHPVEEEDAATYYCQQSNEDPSTFGGGTKLEVK

SEQ ID NO: 1369 - protein, 288 aa, synthetic construct
MECNWILPFILSVTSGVYSEILLQQTGTVLARPGTSVKMSCKASGYTFTNYRMHWVKQRPGQGLEWIGGIYPGNSDTNYNQKFKDKAKLTAVTSTSTANMELSSLTNEDSAVYYCLRGIRGSYFDYWGQGTTLTVSSGGGGSGGGGSGGGGSGGGGSMETDTILLWVLLLWVPGSTGDIVLTQSPASLAVSLGQRATISCKASQSVDYDGDSYMNWYQQKPGQPPKLLIYAASNLESGIPARFSGSGSGTDFTLNIHPVEEEDAATYYCQQSNEDPSTFGGGTKLEVK

SEQ ID NO: 1370 - protein, 288 aa, synthetic construct
METDTILLWVLLLWVPGSTGDIVLTQSPASLAVSLGQRATISCKASQSVDYDGDSYMNWYQQKPGQPPKLLIYAASNLESGIPARFSGSGSGTDFTLNIHPVEEEDAATYYCQQSNEDPSTFGGGTKLEVKGGGGSGGGGSGGGGSGGGGSMECNWILPFILSVTSGVYSEILLQQTGTVLARPGTSVKMSCKASGYTFTNYRMHWVKQRPGQGLEWIGGIYPGNSDTNYNQKFKDKAKLTAVTSTSTANMELSSLTNEDSAVYYCLRGIRGSYFDYWGQGTTLTVSS

SEQ ID NO: 1371 - protein, 6 aa, synthetic construct
HHHHHH

SEQ ID NO: 1372 - protein, 69 aa, Homo sapiens
TTTPAPRPPTPAPTIASQPLSLRPEACRPAAGGAVHTRGLDFACDIYIWAPLAGTCGVLLLSLVITLYC

SEQ ID NO: 1373 - protein, 42 aa, Homo sapiens
KRGRKKLLYIFKQPFMRPVQTTQEEDGCSCRFPEEEEGGCEL

SEQ ID NO: 1374 - protein, 112 aa, Homo sapiens
RVKFSRSADAPAYQQGQNQLYNELNLGRREEYDVLDKRRGRDPEMGGKPRRKNPQEGLYNELQKDKMAEAYSEIGMKGERRRGKGHDGLYQGLSTATKDTYDALHMQALPPR

SEQ ID NO: 1375 - protein, 21 aa, Homo sapiens
MALPVTALLLPLALLLHAARP

SEQ ID NO: 1376 - protein, 21 aa, Homo sapiens
METDTLLLWVLLLWVPGSTGD

SEQ ID NO: 1377 - protein, 12 aa, synthetic construct
GGGSGGGSGGGS

SEQ ID NO: 1378 - protein, 15 aa, synthetic construct
GGGGSGGGGSGGGGS

SEQ ID NO: 1379 - protein, 20 aa, synthetic construct
GGGGSGGGGSGGGGSGGGGS

SEQ ID NO: 1380 - protein, 18 aa, synthetic construct
GSTSGSGKPGSGEGSTKG

SEQ ID NO: 1381 - protein, 18 aa, synthetic construct
GGSSRSSSSGGGGSGGGG

SEQ ID NO: 1382 - protein, 22 aa, synthetic construct
GSGATNFSLLKQAGDVEENPGP

SEQ ID NO: 1383 - protein, 24 aa, synthetic construct
SGGGGEGRGSLLTCGDVEENPGPR

SEQ ID NO: 1384 - DNA, 4651 bp, synthetic construct
  source 1..4651: mol_type = other DNA
atatccagaaccctgaccctgccgtgtaccagctgagagactctaaatccagtgacaagtctgtctgcctattcaccgattttgattctcaaacaaatgtgtcacaaagtaaggattctgatgtgtatatcacagacaaaactgtgctagacatgaggtctatggacttcaagagcaacagtgctgtggcctggagcaacaaatctgactttgcatgtgcaaacgccttcaacaacagcattattccagaagacaccttcttccccagcccaggtaagggcagctttggtgccttcgcaggctgtttccttgcttcaggaatggccaggttctgcccagagctctggtcaatgatgtctaaaactcctctgattggtggtctcggccttatccattgccaccaaaaccctctttttactaagaaacagtgagccttgttctggcagtccagagaatgacacgggaaaaaagcagatgaagagaaggtggcaggagagggcacgtggcccagcctcagtctctccaactgagttcctgcctgcctgcctttgctcagactgtttgccccttactgctcttctaggcctcattctaagccccttctccaagttgcctctccttatttctccctgtctgccaaaaaatctttcccagctcactaagtcagtctcacgcagtcactcattaacccaccaatcactgattgtgccggcacatgaatgcaccaggtgttgaagtggaggaattaaaaagtcagatgaggggtgtgcccagaggaagcaccattctagttgggggagcccatctgtcagctgggaaaagtccaaataacttcagattggaatgtgttttaactcagggttgagaaaacagctaccttcaggacaaaagtcagggaagggctctctgaagaaatgctacttgaagataccagccctaccaagggcagggagaggaccctatagaggcctgggacaggagctcaatgagaaaggagaagagcagcaggcatgagttgaatgaaggaggcagggccgggtcacagggccttctaggccatgagagggtagacagtattctaaggacgccagaaagctgttgatcggcttcaagcaggggagggacacctaatttgcttttcttttttttttttttttttttttttttttttgagatggagttttgctcttgttgcccaggctggagtgcaatggtgcatcttggctcactgcaacctccgcctcccaggttcaagtgattctcctgcctcagcctcccgagtagctgagattacaggcacccgccaccatgcctggctaattttttgtatttttagtagagacagggtttcactatgttggccaggctggtctcgaactcctgacctcaggtgatccacccgcttcagcctcccaaagtgctgggattacaggcgtgagccaccacacccggcctgcttttcttaaagatcaatctgagtgctgtacggagagtgggttgtaagccaagagtagaagcagaaagggagcagttgcagcagagagatgatggaggcctgggcagggtggtggcagggaggtaaccaacaccattcaggtttcaaaggtagaaccatgcagggatgagaaagcaaagaggggatcaaggaaggcagctggattttggcctgagcagctgagtcaatgatagtgccgtttactaagaagaaaccaaggaaaaaatttggggtgcagggatcaaaactttttggaacatatgaaagtacgtgtttatactctttatggcccttgtcactatgtatgcctcgctgcctccattggactctagaatgaagccaggcaagagcagggtctatgtgtgatggcacatgtggccagggtcatgcaacatgtactttgtacaaacagtgtatattgagtaaatagaaatggtgtccaggagccgaggtatcggtcctgccagggccaggggctctccctagcaggtgctcatatgctgtaagttccctccagatctctccacaaggaggcatggaaaggctgtagttgttcacctgcccaagaactaggaggtctggggtgggagagtcagcctgctctggatgctgaaagaatgtctgtttttccttttagaaagttcctgtgatgtcaagctggtcgagaaaagctttgaaacaggtaagacaggggtctagcctgggtttgcacaggattgcggaagtgatgaacccgcaataaccctgcctggatgagggagtgggaagaaattagtagatgtgggaatgaatgatgaggaatggaaacagcggttcaagacctgcccagagctgggtggggtctctcctgaatccctctcaccatctctgactttccattctaagcactttgaggatgagtttctagcttcaatagaccaaggactctctcctaggcctctgtattcctttcaacagctccactgtcaagagagccagagagagcttctgggtggcccagctgtgaaatttctgagtcccttagggatagccctaaacgaaccagatcatcctgaggacagccaagaggttttgccttctttcaagacaagcaacagtactcacataggctgtgggcaatggtcctgtctctcaagaatcccctgccactcctcacacccaccctgggcccatattcatttccatttgagttgttcttattgagtcatccttcctgtggtagcggaactcactaaggggcccatctggacccgaggtattgtgatgataaattctgagcacctaccccatccccagaagggctcagaaataaaataagagccaagtctagtcggtgtttcctgtcttgaaacacaatactgttggccctggaagaatgcacagaatctgtttgtaaggggatatgcacagaagctgcaagggacaggaggtgcaggagctgcaggcctcccccacccagcctgctctgccttggggaaaaccgtgggtgtgtcctgcaggccatgcaggcctgggacatgcaagcccataaccgctgtggcctcttggttttacagatacgaacctaaactttcaaaacctgtcagtgattgggttccgaatcctcctcctgaaagtggccgggtttaatctgctcatgacgctgcggctgtggtccagctgaggtgaggggccttgaagctgggagtggggtttagggacgcgggtctctgggtgcatcctaagctctgagagcaaacctccctgcagggtcttgcttttaagtccaaagcctgagcccaccaaactctcctacttcttcctgttacaaattcctcttgtgcaataataatggcctgaaacgctgtaaaatatcctcatttcagccgcctcagttgcacttctcccctatgaggtaggaagaacagttgtttagaaacgaagaaactgaggccccacagctaatgagtggaggaagagagacacttgtgtacaccacatgccttgtgttgtacttctctcaccgtgtaacctcctcatgtcctctctccccagtacggctctcttagctcagtagaaagaagacattacactcatattacaccccaatcctggctagagtctccgcaccctcctcccccagggtccccagtcgtcttgctgacaactgcatcctgttccatcaccatcaaaaaaaaactccaggctgggtgcgggggctcacacctgtaatcccagcactttgggaggcagaggcaggaggagcacaggagctggagaccagcctgggcaacacagggagaccccgcctctacaaaaagtgaaaaaattaaccaggtgtggtgctgcacacctgtagtcccagctacttaagaggctgagatgggaggatcgcttgagccctggaatgttgaggctacaatgagctgtgattgcgtcactgcactccagcctggaagacaaagcaagatcctgtctcaaataataaaaaaaataagaactccagggtacatttgctcctagaactctaccacatagccccaaacagagccatcaccatcacatccctaacagtcctgggtcttcctcagtgtccagcctgacttctgttcttcctcattccagatctgcaagattgtaagacagcctgtgctccctcgctccttcctctgcattgcccctcttctccctctccaaacagagggaactctcctacccccaaggaggtgaaagctgctaccacctctgtgcccccccggcaatgccaccaactggatcctacccgaatttatgattaagattgctgaagagctgccaaacactgctgccaccccctctgttcccttattgctgcttgtcactgcctgacattcacggcagaggcaaggctgctgcagcctcccctggctgtgcacattccctcctgctccccagagactgcctccgccatcccacagatgatggatcttcagtgggttctcttgggctctaggtcctgcagaatgttgtgaggggtttatttttttttaatagtgttcataaagaaatacatagtattcttcttctcaagacgtggggggaaattatctcattatcgaggccctgctatgctgtgtatctgggcgtgttgtatgtcctgctgccgatgccttcattaaaatgatttggaagagcaga

SEQ ID NO: 1385 - DNA, 1675 bp, synthetic construct
  source 1..1675: mol_type = other DNA
aggacctgaacaaggtgttcccacccgaggtcgctgtgtttgagccatcagaagcagagatctcccacacccaaaaggccacactggtgtgcctggccacaggcttcttccctgaccacgtggagctgagctggtgggtgaatgggaaggaggtgcacagtggggtcagcacggacccgcagcccctcaaggagcagcccgccctcaatgactccagatactgcctgagcagccgcctgagggtctcggccaccttctggcagaacccccgcaaccacttccgctgtcaagtccagttctacgggctctcggagaatgacgagtggacccaggatagggccaaacccgtcacccagatcgtcagcgccgaggcctggggtagagcaggtgagtggggcctggggagatgcctggaggagattaggtgagaccagctaccagggaaaatggaaagatccaggtagcagacaagactagatccaaaaagaaaggaaccagcgcacaccatgaaggagaattgggcacctgtggttcattcttctcccagattctcagcccaacagagccaagcagctgggtcccctttctatgtggcctgtgtaactctcatctgggtggtgccccccagccccctcagtgctgccacatgccatggattgcaaggacaatgtggctgacatctgcatggcagaagaaaggaggtgctgggctgtcagaggaagctggtctgggcctgggagtctgtgccaactgcaaatctgactttacttttaattgcctatgaaaataaggtctctcatttattttcctctccctgctttctttcagactgtggctttacctcgggtaagtaagcccttccttttcctctccctctctcatggttcttgacctagaaccaaggcatgaagaactcacagacactggagggtggagggtgggagagaccagagctacctgtgcacaggtacccacctgtccttcctccgtgccaacagtgtcctaccagcaaggggtcctgtctgccaccatcctctatgagatcctgctagggaaggccaccctgtatgctgtgctggtcagcgcccttgtgttgatggccatggtaagcaggagggcaggatggggccagcaggctggaggtgacacactgacaccaagcacccagaagtatagagtccctgccaggattggagctgggcagtagggagggaagagatttcattcaggtgcctcagaagataacttgcacctctgtaggatcacagtggaagggtcatgctgggaaggagaagctggagtcaccagaaaacccaatggatgttgtgatgagccttactatttgtgtggtcaatgggccctactactttctctcaatcctcacaactcctggctcttaataacccccaaaactttctcttctgcaggtcaagagaaaggatttctgaaggcagccctggaagtggagttaggagcttctaacccgtcatggtttcaatacacattcttcttttgccagcgcttctgaagagctgctctcacctctctgcatcccaatagatatccccctatgtgcatgcacacctgcacactcacggctgaaatctccctaacccagggggaccttagcatgcctaagtgactaaaccaataaaaatgttctggtctggcctga

SEQ ID NO: 1386 - DNA, 1708 bp, synthetic construct
  source 1..1708: mol_type = other DNA
aggacctgaaaaacgtgttcccacccaaggtcgctgtgtttgagccatcagaagcagagatctcccacacccaaaaggccacactggtgtgcctggccacaggcttctaccccgaccacgtggagctgagctggtgggtgaatgggaaggaggtgcacagtggggtcagcacagacccgcagcccctcaaggagcagcccgccctcaatgactccagatactgcctgagcagccgcctgagggtctcggccaccttctggcagaacccccgcaaccacttccgctgtcaagtccagttctacgggctctcggagaatgacgagtggacccaggatagggccaaacctgtcacccagatcgtcagcgccgaggcctggggtagagcaggtgagtggggcctggggagatgcctggaggagattaggtgagaccagctaccagggaaaatggaaagatccaggtagcggacaagactagatccagaagaaagccagagtggacaaggtgggatgatcaaggttcacagggtcagcaaagcacggtgtgcacttcccccaccaagaagcatagaggctgaatggagcacctcaagctcattcttccttcagatcctgacaccttagagctaagctttcaagtctccctgaggaccagccatacagctcagcatctgagtggtgtgcatcccattctcttctggggtcctggtttcctaagatcatagtgaccacttcgctggcactggagcagcatgagggagacagaaccagggctatcaaaggaggctgactttgtactatctgatatgcatgtgtttgtggcctgtgagtctgtgatgtaaggctcaatgtccttacaaagcagcattctctcatccatttttcttcccctgttttctttcagactgtggcttcacctccggtaagtgagtctctcctttttctctctatctttcgccgtctctgctctcgaaccagggcatggagaatccacggacacaggggtgtgagggaggccagagccacctgtgcacaggtacctacatgctctgttcttgtcaacagagtcttaccagcaaggggtcctgtctgccaccatcctctatgagatcttgctagggaaggccaccttgtatgccgtgctggtcagtgccctcgtgctgatggccatggtaaggaggagggtgggatagggcagatgatgggggcaggggatggaacatcacacatgggcataaaggaatctcagagccagagcacagcctaatatatcctatcacctcaatgaaaccataatgaagccagactggggagaaaatgcagggaatatcacagaatgcatcatgggaggatggagacaaccagcgagccctactcaaattaggcctcagagcccgcctcccctgccctactcctgctgtgccatagcccctgaaaccctgaaaatgttctctcttccacaggtcaagagaaaggattccagaggctagctccaaaaccatcccaggtcattcttcatcctcacccaggattctcctgtacctgctcccaatctgtgttcctaaaagtgattctcactctgcttctcatctcctacttacatgaatacttctctcttttttctgtttccctgaagattgagctcccaacccccaagtacgaaataggctaaaccaataaaaaattgtgtgttgggcctggttgcattt

SEQ ID NO: 1387 - DNA, 3631 bp, synthetic construct
  source 1..3631: mol_type = other DNA
ctttccggtacctgtgagtcagctaggggagggcagctctcacccaggctgatagttcggtgacctggctttatctactggatgagttccgctgggagatggaacatagcacgtttctctctggcctggtactggctacccttctctcgcaaggtaaggctactccaggtgggtgggggaagggacctgagagggacattactgatgggagtgaggcccacttgaaagtgtttcttgccaggcacggtggctcacaccagtaatcccagagctttgggaggccgaagtgggaggatcctttgaggccaggagtttgagaccagtctgagcaacatgatgagactctatctttacaaaaaacaaaagaattagccaggcatggtggtgcacaactgtagtcccagctatttgagaggctgaggcaggagggtcacttgagcccgggatttcaaggcttcagtgagctgtgatcatgccactgccctccaacctaggcaacctgtgagaccttatctcaaaaaaaaaaaaaagtgcttctcggtgctagcttcagttcaccaggcaccccaggggtgtcaggagggcaggggcaggatgtagcatagagtctgggaaacaggctcttggctttgactgactccagccatgggtgcatgtgggcctagaatgtctctcagaaggccttaggccagagatctgcagaaaatagctcagtacgtatgtacctgaatctgggactggccatgggagcacagcttcctgcactactccttttaggcctgatggcctctggaatcaggactcttgtttgtttggccatgattatgtcatccctggaggcatgtcctagcacttatgtgaatgctttaagagaagttaactttaggttgagcaggacggagggaagatttgaggggttgttacatggtaggattttaactcatctcagtttgccaatttcagttttaaaatggaaagtcccatgtccgaggaaccccttcaacactaagcaaactgggtccaatggtcacctaatagttggctgcactagggcactcaggatttccactggagacagatccctgaagaggacgcgactgtaggacgtgaagcatttgatgtgcatgtgtctccctgaggatacatgcatatacttccaacctgcttcagaagtgtgagcaacagctgtttcagggttttctagaagatgctcttgtatccaaatttgggacttagtgtgaagcccaggatgaatgaatgtagcctccacttttccctgtgtttggaggcatagactgtagtgcctctgtggcctgtggagatgtgctcaggctgtcagaggaactcactgcatctggaatgttgctgcactcacctccagccctaaaagtctcccacaagacttgacttgtgaggagctctagggatggattcaataaaatttttttcctgttctcctccttctaaccaagggtggaaaactgtacatgggatttgccctggtcccgttctggaccacttggctgataattcaggggctggtaaaccagctggtctccacccacagccatccctggccctgggaaaggcttcagtgttgagagccccgctttcttggttgtcaatggagcaggggcaatgaggaaggatgaggataagaagctgaagtgggagtgttgtagatggctgggaagtggaattagatgtttccttgaagaaaaaatgcagacatttccaatcgaggaatgttcttctgtctttccacatcttccaggtgcttcagtggtccgtgctccccctactcctcatcagtggtctggattcatttccaggaaggtgcttgggtcaatcctgctctgaggggtcctcttttgcaccaaggccccaagacctgtcctctgcttgaatggcatcctcatgtcccccttgacccctgcagttggtggggaactttctgaaggctttttcttgtgacttctgtctctcttgatggaagccataaactgtcctggaccaggaaaatggtctctgttaagtatgagcttccgcagaacaaagggcttggtgcagatcaaagagctgtctccaactgtgatattttttcccctttagtgagccccttcaagatacctatagaggaacttgaggacagagtgtttgtgaattgcaataccagcatcacatgggtagagggaacggtgggaacactgctctcagacattacaagactggacctgggaaaacgcatcctggacccacgaggaatatataggtgtaatgggacagatatatacaaggacaaagaatctaccgtgcaagttcattatcgaagtacgtgcttcctgaaccctttgggttggaatggatagggcttctggatgtgagaactttctggctagagagggatatggtgaacccatctgttctctaaacaaagtgaggtcactattgtaatggtacaagccagatttggggaccttcaaagtggaagagagagcttaactcagcaagacagagcagtaggggtcatgttactgcagccttggttgggtgagaggtttggcccaccaccttgttcaaggtcccaaaagctgagattacttcttggctcttcccagggattccttaggatgcagggtggaggaaggtgtggcaagcccatcaccaggcctttctcccagggtcttattgaagtttgggttttggcataagagatctaagggttgccctaggaggcagaggatggttccctgatcttaaaggctctcaacctctcctctctcctcccttcccccacagtgtgccagagctgtgtggagctggatccagccaccgtggctggcatcattgtcactgatgtcattgccactctgctccttgctttgggagtcttctgctttgctggacatgagactggaaggctgtctgggggttagtggaagagcagagcatgagagtgtgtttgtgtgtgtgtgtgtgtgtgtgtgtgtgtgtgtaccagtgagcttatgcaccagctaaggaatggggctggtggtaggtttagtctcagctgggagttactcttgcaatctcctaaagactcctagaactttgactgttgaaagaacttgtgtgttcatatcactcatgcagacttctgagggtgtgggagggtggatctcacagtcccatctgctaggccattgatgtctctctctggttcttctagctgccgacacacaagctctgttgaggaatgaccaggtctatcaggtgagcgttgaggggaaggaggcaggaatgaagggagggtaagtggggatagagaggctcacactgaatgctgtttgcacgtgggaagggtcctactggggagttcattgctgggtgtgactggagaggtcaggcaggagctctcatcgtcagggcctgctggggcccttccttgaagagttctaaccctgcctcctgaccgttttctcttctcctctcttagcccctccgagatcgagatgatgctcagtacagccaccttggaggaaactgggctcggaacaagtgaacctgagactggtggcttctagaagcagccattaccaactgtaccttcccttcttgctcagccaataaatatatcctctttcactca

SEQ ID NO: 1388 - DNA, 11446 bp, synthetic construct
  source 1..11446: mol_type = other DNA
agaaaccctcctcccctcccagcctcaggtgcctgcttcagaaaatggtgagtctctctcttataaagccctcctttttcatcctagcattgggaacaatggccccagggtccttatctctagcagatgttttgaaaaagtcatctgttttgctttttttccagaagtagtaagtctgctggcctccgccatcttagtaaagtaacagtcccatgaaacaaagatgcagtcgggcactcactggagagttctgggcctctgcctcttatcaggtgagtaggatggagtggaaagggtggtgtgtctccagaccgctggaaggcttacagccttacctggcactgcctagtggcaccaaggagcctcatttaccagatgtaaggaactgtttgtgctatgttagggtgagggattagagctggggactaaagaaaaagataggccacgggtgcctgggagagcgttcggggagcaggcaaagaagagcagttggggtgatcatagctattgtgagcagagaggtctcgctacctctaagtacgagctcattccaacttacccagccctccagaactaacccaaaagagactggaagagcgaagctccactccttgttttgaagagaccagatacttgcgtccaaactctgcacagggcatatatagcaattcactatctttgagaccataaaacgcctcgtaatttttagtccttttcaagtgaccaacaactttcagtttatttcatttttttgaagcaagatggattatgaattgataaataaccaagagcatttctgtatctcatatgagataaataataccaaaaaaagttgccatttattgtcagatactgtgtaaagaaaaaattatttagacgtgttaactggtttaatcctacttctgcctaggaaggaaggtgttatatcctctttttaaaattctttttaattttgactatataaactgataagtcctctctacttcacagattaagaaattgatactcaaaaaagttaaataacttgttttaaaccacatagtaagtgccgaagccaatctgtgagaccaggactgtttgtactctaaatggctgcaccacatgaggcaaaatggctcgtgatggttttatttcaaagacctagaaaacactatcacagctggtgctcccgtctcagacccacagcaacgatgtctccacttcctgcttcatcttgggtttctcacgtcttgaatgtgcacacaaatcacctggggatcttgttaaaaatgcagcttctgtttcaaaagacccagactggaaatggagattccgcatgtctagtacgctctcaagtttattaatctgctgctggtcctaggaacatattgagtagcgaggggcaggatgtgactcctgtaaggagtggccaggcattttcttagagacctgtgttataaagtatgcttttccttaaaaaaaagaagaaggaggaggaggagaagggccaggtgcagtggcttacgcctgtaagcccagcattttgggggaccaaagtgggaagatcacttgagctcaggagttcaagaccagcctgggcaaagtagtgaaaccccatttctacaaaaaattaaaaattagccaggcaaggtggcacacacctatagttccagctacttgggaggctgaggtggaaggatcacttgagcccaggaggtcgaggctgcagtaagccatgatcaagccactgcactccagcctggagtgtctcaaaatagataaataaataaataaataaataaataaataaataaataaaagagacagtatcaaagacccaatcacctctagacatctggcatcataggaatgtgcccagtctgctctggggataggaaagtggggatcctgtctccccctgtgtagaggtttcagtaaaagaaaggcctaggtgtgcagaaagctttcaggcaatgccagggaaactgatcattgtaatgaatccagggtattgctgagtgagggcatcctggagggcccggtggaaatgtggtcaggctcttcaatgcacaggccctagttgatgagtaatcagggtttcaaatatttccatctctgtctcaagcagaaaacaaatggaaaaactgaaccaccagaaaagcagagccagagatggaacaagaatcccagtgtttgtacccaaccaagagcgtgtttttcttccacagacaccaatgttcaaaatggaggcttgggggcaaaattcttttgctatgtctctagtcgtccaaaaaatggtcctaactttttctgactcctgcttgtcaaaaattgtgggctcatagttaatgctagatgcttccttcctctatttccccccaaatttcctgggaacccctggtcaataccagcagtaagttccactgttctagggtgtagaaatggctgtgacccagcagcaagagggaaggacatcagatgtcatcagtggtcatactgcaacacagccctttttctgtttaggaatgcaggtacccacaacatttactaacactttttttttcttatttattttctagttggcgtttgggggcaagatggtgagatatgctttctttctttcttttttatgaaatcaccccatcattctttgtagttatgaatggagctttctcttaggcctcccacagaacttccacagaggtcaggaaaaggagtttctgccatctacccctttgactttcctcacaagtctggagatatttctagcccagaagagggaagcaacagaggcaggaaataatgagtcttaaccatacaaaagaaaaattgagacttaaatgaagttgaaagcactaacagttttcatttgtttgcatttcatatttgatgtgagattctgcagaggagacgtagccagaatgcatgcacagggttactctggataagctgctggggcaacatttggatgtgtgttcagaatcacatgtctgaatactctgaatatatgtgtgtacatgtgtatttatgcaagtgcacatgcatatgagtgtgcccggcctgaacttactctctcaaccacagcggtagagtcaggagtgttccaacattggaagcccctctattcaatcagctcttccaaactgagtgaaccaatgttgtatttaatggcaaccatggctggacaccatggctcacacctgtaatcccagcactttgggaggccgaggtgggcagatcacttgaggccaggagttcgagaccagcctggccaacatggcgaaaccccgtctctactaaaaataccaaaatcagccagacatggtggtgtacgcctgtagtcctagctactcgagaagctgaggcaggagaatcgcttgaacctgggaggcagaggttgtagtgagccgagatcacaccactgcactctagcctgggtgacacatcgagactgtctcaaaaataaaataaagacaaccattatgccagcctagattccgccatgctgcctaatttgtagtgtccttaggagccatttttgtaaatagtcatcagataagatgtaaggcccataacagctttttctatgcagctgagggaattggaagatccattgtttcctaagagttgagggaagagtcccaacccacgggagcagggtctgatcttcattgccgatagaaacattactaatggcttcttactgtttccttttcaggtaatgaagaaatgggtaagaagatttccactctatctagcaaaagttttcaaatatggaatgaaatgctcatagagtacaatcacagtaacaaaccctgagaactaaaactattaaagggaaaatacaagtatctttcaatgggatccgtatgaaacttgcctgtatttgttgctagctgtcatgtcagattatagctgtgcatatatgtatctctgatcatacacatatggatgtgggttggagctaccatgtgtttttgtataagccatgaaatctttgaaggcagacagagacagtgtctcatttacctagcccagtgtctggcacatagtaggtgctcaatgaatattttttgaatgaataaatgaacaaacatatgaacacattgctaattacctcccctcaagaagctgatggtcttgtgtgagagacaaataattgaaaatatagtgagttgcatgttataatatgggtagatacagagtaaaatgaagtataaagaggggagtggtcaactctactgagtgtcgttgggaaaggttccctgggggaggtggtccttgagctgaattttaaaggataagcttatgttttagggaagaaaaatattttatgcagaagagataaagctgtatagtatgaggataagagtctaactgagctagatcagaatgtttgaatcttggctcaactctctacttgctgggtgtgtttgagtaatttacctaacttttctgtgccacagcatcatcatggtacaatggaaataatagtgctacctaacttgtagggttattatgaggaccaaatgagtaattcatttaaggcacttagaacattatctgacataaaaggcagtaggagggccgggcatggtggctcacacctgtaatcccagcactttgagaagccgaggtgggaggatcacctgaggtcaggagttcgagaccggcctggccaacatggtgaaactccatctctgctaaaaatacaaaaattagccaggcatggtggcaggtgcctgtaatctcagctactcaggaggctgaggtaggagaattgcttgaacctgggaggcggaggttggagtgagctgagattgtgccattgcactccagcctgggcgacagagcaagactctgtctcaaaacaaacaaacaaacaaacagacagtaggtgaattttagctattaatacatggaaagcatgctgactatagatgataagcattaaagtttactgagcatgtatgttttaggcattgctctaaatattttacttgaatttcctcatttaattcttccaacacccctactgtacagttaaggaaacaaagcctcaaataaatacagaaataaacaaaaataagtaaacaatccagtcctggggatataaatgcagatttaggccaagtgccatggttcatgcctataatcccaacactttgggaggccaaggcaggaggctcgcttgagctcagaaggttgaggctgcattgagcaaagattgtgccactgtactcgagcctctgtggcagagaaagaccctgtctctgaaaaaattaataaatagaaatttaaaaataaaaaaattttaatgcagatttatatgataccgaagttcattttctcaaccattatgaaatactgtttctggatatgtataaaatctttgtgagcacacatatctttttttaacttaactttcattttaaattcaggggtacatgtgcaggtttgttatataggtaaacttgtgccatgggggtttgttgtatagattatttcatcacccaggcattaagcctggtacctgttagttatttttcctgatcctctccctcctcccaccctccaccttctgagaggtcccagtgtgtgtcatttccctctgtgttcatgtgttctcatcatttagctcccacttctaaatgagaacatgtggtatttggttttctgtcactgtgttagtttgctaaagataatggcctccagtcccatccatgttcctgcaaaggacgtgatctcattcttttttatggctgcgtagtattccatggtgtatatgcagcacatttttttatccagtctaccactgacaggcatttaggttgattccatgtctttgctattgtgaatagtgcacaatgaacatacgtggagcacatttctgtctaagcacagacatctagacccttgtgtgagcatgagttaagtctaagctctgctactgaatttgtgccaataaaagttgtgagcaattttctttacatttttttcaaacaaacacacccagcagagtataatgtctatgtactttatttatgatttctagttcatttaacatgtctaagaaacatccgtgttgaaaaattatttataaattaaaataatataaactatctactgtccttatactcaactcccaattataagcaggtggaaaaacctggagaatgttttgtttacattctgtgcagtctttgtcagagggctgcctgagcaactgggtcagagtttagttctgctctgggagtagcaggacctcaagaaggaaaggaggaaaggaagtaactttttcttgagcacctgctatgtgtcattcactttcaccttcataatccatttaattttcgcaaaaactttgtgaggttggtgttttatctccatttccctgataaagaagttgaggttcagcaaagttaaatgacttgccctcagtcacacagactagggcagatccaggattcaaactcagggcttctgactcttgagtccagagctctgtccctgacagcagcagcactgcctctcctctcttccagctgttatgtccagactgtagcagaacccagtgttccagccacaagttttccaggaaataataaaggactcctagctccacctcccagggcaaaaatggctgctgtgggaaacacaggctggacctacgaatggcattagtggtttattagttgatttcagttgtccacactaataggcctccctctaacaaaaataattgagagctgattatgctcagatataatgtaaagtgaagccactttttattggaagaagcattccctcaaaacgtgtagagtatttcacattatttaaaggcaaatagagagaaaattatatggaataagaacaaagatgtttcttctctattatgagggactcagttctgagaaaggattttaaattgtaagaaataggtaagtccacgaatcagtgattcagtggtgtggagagctttatttctgagaaggccagtagcgctcccttctgacaagcaaatctaagacctggatgacagatgacttcctgcatttggttggttcttttgtcattcatatctatctgtaatacagttctggctaatttaagaggataagcttgaagacctctggaatttttcggctttaggactttaaggctttctgagcttcagtagatctagatctaggagctcatgctggtatattctgaatccgatgtatctgagttacatctatgagctacttaataaatatatctatgagctaaatctcataggctaagcatgaacctcacctccaagactcggggttcctaaatggatgagaccctctttgggaagtcttgtgggcagtgtctaattccactagaaaagttttacctacaatttaaacttaaaccatgatattttcttactgctgtttccttttttcattttcaggtggtattacacagacacgtgagtttattggtcttttatttatgccctgtctgaggatgcagattggtgggtagatgagaaggaactgattgagagagattaaccccaagaactgatatcttcccagcattgcattctcaactccattttagaaaggttccaaatagggacttctgtgggtttttctttacatccatcttacccttcccaagtccccatgtccctgcgtaaaccctaaagccacctctcaaaaggttctctagttcccttcaaggttctctagttcccttcattccacatatctcctcttccacaccctctagccagtagagctcccttctgacaagcaagtctaagatctagatgacagatgacttcctgcatttgggtggttcttttgtcactaatttgccttttctaaaattgtcctggtttcttctgccaatttcccttctttctccccagcatataaagtctccatctctggaaccacagtaatattgacatgccctcagtatcctggatctgaaatactatggcaacacaatgataaaaacataggcggtgatgaggatgataaaaacataggcagtgatgaggatcacctgtcactgaaggaattttcagaattggagcaaagtggttattatgtctgctaccccagaggaagcaaaccagaagatgcgaacttttatctctacctgagggcaagaggtaatccaggtctccagaacaggtaccaccggctctttagggaggaccattcaaaagggcattctcagtgattttccctaacccagctcacagtgcccaggcgtctttgcgcttcctcccacactcaatcctgggactctctggtaccacacggcatcagtgttttctggaatatagattaaacaccaatatgaggcttctgggtaaccccagtctgtgcgagatctaaaatagcaactccctaagagacaggactgggtcatttgcaccgcatcacacccaggttcatagcacaccaacatgagtttatctaatgcttcctccagagataaatttttcagaaaggtttgcaaaaaacactcaaggccactatagtaaaatggcataagctaaggtataataataaaataataacaatacttaacatttattgagtgcttattaagtctcaagcactgtctgtacccaacacttatcaaggattctttttcatgtaatcctctcaacaactatatgggttaagtatcattttattcccatgagtaaagggatgaggaaacagagggtttgtgagttgaaaacacatttcacgcttctcacagctagtgagtaataaagctgggactcaaacccagggctgtttgactccagtgcctctacccacggccaccactctttgcttgtcaatgttgttctaaacatattgaagggggggctctgaccgtggcaagcgtgtgagtagtaaggggagaatggccttcatgcactccctcctcacctccagcgccttgtgttttccttgcttagtgatttcccctctccccaccccaccccccacagtgtgtgagaactgcatggagatggatgtgatgtcggtggccacaattgtcatagtggacatctgcatcactgggggcttgctgctgctggtttactactggagcaagaatagaaaggccaaggccaagcctgtgacacgaggagcgggtgctggcggcaggcaaaggggtaaggctgtggagtccagtcagaggagattcctgccaagggggacgaccagcctgggccagggtgggtggcaagtccacagctaggtcagaacagcttctctagagcttctatgcacagcttctattactgtgatgacaagatctcaacagacggtttcaaatctcacatcactcccctccttcccatcctagaaaagtgcaaaaaagtttatgaaagtgatgggcttcctcacatacctgtcaatgcctgcagtcatccgattccgcccctaagctgtgggaagagagactttgatatattagctcctgccttttcctttcccttcccctatggagagaaacaatgggaggatcttgagctgaggaaagtcacaaaatgatgagaagagtgtagggtccttagagatgaatgaaagaaaaaaaaagagaaaggacgtctgaacagaaaagggagcggtagaggagagaacaatggggtttgccattctctatctgggtctcactggcacagacagtgctgcaagattggttccctcatgggaatgaaatgtttcccctccttcctccgcaggacaaaacaaggagaggccaccacctgttcccaacccagactatgaggtaacgtgggatagaaatgggccaggacgctggaggggatgtccctccaggggggaaggaaacagatgggatggcccatcttgtctgccagatgcctcaaagcccctcactcagggcttccattacaaccctctatgtgccacctctgcgtccttcatggtaaaacaggactgtctcaaaggctgcatggcttccacaaccatggagaggtggaagcttgcaggagacatactcctctttctctggcttattcattgactgggatacagccatggagaatattatatatgcaaattctaacacaataaattctgggctgatattccaccagcatgcaccagtatagcgagttattgaaatattaaaattatataaatattatataaaagttattgaaatattaaaatactcattgggaaatagccccaaactttgctcaccccaacccacccttacacacacacatacacacacacacacacacacacacacacacacacacacacgtgaccagacatcccagtccctcccctaccgggctgcctcttgagttggggtaacaaagagttaatgcctggcatggcagaggatcaccaggattgttctagttgattggtatgtgtgcactcctagttgttaaatattttcactatcacacctggatatactcaacaaatatttgttgagccaaatactcaacaccagccaaacacgtagtatttactttagcttaagcgaattatttagccctgacagaagccctggaatgtgggtctttaagttcctatttttgagatgggaaagctgaggctcacggaaggaggtgaccagctcaagtctcctaccgtccatgccaaattagaattccagcctgcctcctgacttcaagtccaaagttcttcccacgcactaaagctagctcttcagtgtcctttcttaggaggtacttcctcccgcaccactgaccgccccctctctatttcacccccagcccatccggaaaggccagcgggacctgtattctggcctgaatcagagacgcatctgaccctctggagaacactgcctcccgctggcccaggtctcctctccagtccccctgcgactccctgtttcctgggctagtcttggaccccacgagagagaatcgttcctcagcctcatggtgaactcgcgccctccagcctgatcccccgctccctcctccctgccttctctgctggtacccagtcctaaaatattgctgcttcctcttcctttgaagcatcatcagtagtcacaccctcacagctggcctgccctcttgccaggatatttatttgtgctattcactcccttccctttggatgtaacttctccgttcagttccctccttttcttgcatgtaagttgtcccccatcccaaagtattccatctacttttctatcgccgtccccttttgcagccctctctggggatggactgggtaaatgttgacagaggccctgccccgttcacagatcctggccctgagccagccctgtgctcctccctcccccaacactccctaccaaccccctaatcccctactccctccaccccccctccactgtaggccactggatggtcatttgcatctccgtaaatgtgctctgctcctcagctgagagagaaaaaaataaactgtatttggctgcaaga

SEQ ID NO: 1389 - DNA, 10818 bp, synthetic construct
  source 1..10818: mol_type = other DNA
agtctagctgctgcacaggctggctggctggctggctgctaagggctgctccacgcttttgccggaggacagagactgacatggaacaggggaagggcctggctgtcctcatcctggctatcattcttcttcaaggtaagggcctactaggggtctggaagcctggggaagggctcaagggaagagcccatcactagtgagacaggaatattggtatccctaaccttcagcctacctctgctgtcaccttagagttcaaagaagggcaaaatggaggctcttaactgttctctgctagagagaaacagtgtcccatggaggagaaggaatccttgtctctgaaaaatgcaaacagagtacttaaatggctgaagagaggaccctgttaccgccatcttagatttgaatgcagcccaaaagggcataggccaagaaactaaaaggaaaaagtatatgttccctacttcagagctgggggctagcagtcgacctaggaaatgtccattcactcagttgggcagttggccaattggtcaacaaagatgggtgagaccctaatatgtgatatgccatgaggaaataaaaatgaataaaacacttatgctctacagaactcatagtctcattggagagattagttttcatggtgccagactgagtgtacagtatagtatgggtgcctgcatgaatactccattggactatccaataggaagtggatgaactgggttgatgcctggagtctggacatcctgggaaagttaaaaccatggaatttgctgaagtcacacaagtactatgtgaggaagagggagctgaagatggaacagtgagggcaccaattttaaggggcagttagagaaaaaaaaacattccaggaaagagataaaaggagaatcaaagagctgaaataatcaaatgtatgcactaccttggaaaccaagagagtagagagcttctagaagaagagaattaccaagagtataaaatgttaaagagagcccactaatataagaatatatttaaaagtttaagtctgcgggatgtggcagaatatgcatcatgggtgatttagcacagtttcagcagggtattgtgagtggaagccaagtgaaaattggtagaaggtgaaggtcaggtgatgaggtcagcaagtgtagactattctttaaagacatttggatgaggagggagaaaagactgggtggtaggtagaggaggaagtagagtctaagaataaatgtttttgagggtgagagaaacttgagcacatttctaggctaaaggagaagatgatgagtagagcaaggtcctggagttgatggtggaaggacagagtcaagagtggggtcaagagcacagagaggaaggcaacgttaccctctaagaccaggagaaaggaagtgcaaacggcactggccacaaataggtttataaagggaaaggaagctaaaggagaaaggacaataacaacttccgtgttctaaaaaatccaggtgggaggcaatgccacctgctgaaactgagctgggtgatgaccggttgggagacttgaagaggacagtgagagtttagaatagaattatttctgagagaaatgcaaggaaaagtcaggtaaagacaacacaggttgaggagcaactctcaagcctgggtgaggtggctgcatatcatggaaagagcatttgagttcagcagtagaaaacctgagctctggatccagcttggacaccaatgagctatgtgtacttgaacaactcctccactgtctgggagttctcatgccagccaatccagaaatgtggcagggacgggcatggtggctcatgcctgtaatcccagcactttgggaggtcgaggcaggtggatcacctgaggtcaggagttcgagaccatcctggtcaacatggtgaaactctatctctactaaaaatattttaaaaattagtggggtgtggtggtgggtgcctgtaatcccagctactcaggaggctgaggcaggagaattgcttgaacccaggagatggaggttgcagtgagccaacacggtgccactgcactccagcctgggcgacagagtgagactccgtctcaaaaaacaaaacaaaaaaaaaagaaatgtggctatatgaactcttaagtcctaaaaggaaacctcactcagatatgcaacattaaaagatgtcaatcagccaggcacagtggctcatggctataatcccaacactttgggaggctagggagggaggatcatttgagcccaggagttcaagaccaacctgggcaaaatagggataccctgtgtctacaaaaactacgaaaattagccaggcatgttggcatgcacttatgccagctacttgggaggctgaagtgggaggattgcttgagcccaggagcttgaggctgcagtgagccatgatcacaccactgcacttcagcctgagtgacagagcaagaaaaaaaaaaaaagatgtctcaaaaaaaaaaaaaaaaactatgtcaatgatcagtgcaatctccttccctgaatccaatttagaatgaggggtctctgtcttctctcggtcttctgaccaggtggtcaggagaaaaactagttagaaacctctttaactgtttgtcttgccttttctcccatttgctcatttattcatttgcacattcattcaacaaataaagttcctaccatgttccagacactgcactggatactgttcaaaaataatcccgccctgcatgaggttctaagacagttcacttcttgtatttccattatactttgactcatgaccgcctctccctatcacacacactccacctctagccacactacctctcttgtccttttccaaagctgcatcttattcagctattctttctactcagaatgactttctctatctggtatattcttgcttactcttcaaggcccagacaaatgtcgtttcctctattaagctttccctgatcctcacccttggacaaaattaatagcttctacccttttttcatatgcagtcatataagcactaaaagataatgtatacattctattaaattaattgcatatatgttttaattttttcacttcattcataaactttggaagcagcagttgattcttcatatcagcactcttttctttcataatatctaattattttaggtcataatagtcctcgttaaatgtttggattaaatctaattgaattgaattcaagtgccagatctctgtaatatgtctaccatgcaactctactaccctaaggttttgtttgtctgtttgtttgtttttatttttttgagacagctttaacacctaggctggagtgcagtggtgcaatcttggctcactgcaacctccacctcccaggctcaaccattcctcccacctcctgagtagctgggactacaggtgcataccaccatgcccggctaatttttttgtattgtctgtagagacagggtttcgccatgttgtccaggctggtgtctaactcctgggctcaggcaatctgcccacctcagcatcccaaagtgctgggattacaggtgtgagccactgctgccagtcaactctgagttatgagacagatttgaggactaattgaaaagctaacttccctgggacatccagggtttttataataaaaggatcaccaaggctgaatattttataaggaactcagcctaaaggttttggatagtgcacacccactccttgccagggcattagctgctcaagaagcagagtgttctggactggataggcaatatccttacttacatatactacaatacaattctgatgctaaccccccaaattagtgtcagaccctacaggttaagagcatggttcccaaccagattgccctcactttaaatgccagctacaagttcagggtaccccagaccactcacatttctgacaaactgcctgcaatcttaaggattcccatgaccctcctcattgataatttgctagaataactcacagaatttaagaaagtgctgtacttcctatttcagttttattaaaaaataaaataaaatcagaaccagctaaatgaaaagggcaaggtctaggagggtcccgaacacagagcctccgtgccctctccccgtggaattagaacacatcgcccccagcactctcccacactctgccagcacattgatgggttcaccaaccaggaagctccaccaagtttttattgaggtatctttacataggcatgattgattgaatcattggccgcttgactgatctcaatctctaggatcccttcctggggctgataccactagtttcaaagctgcaatcctcttaccatatggttggtcttgaccagcaccatcctgagtcattgccatgcataaactcaggtatggtctaaggatccaccacagataacaaagccactcctgtcactcatgaaattccaacggttagaaacaccctcccaggataccaggacaaagatgagacaaattgtttattatcaccttgaattcaattgagtgatttagtctacaatccggaaaactaagtatagatactaccattttcatggatttggatctttcttcatcttggcctcaaataaccatggaaatacttcagggcatctgaacaactccatgcccagctaatactctatctctcttctgtctttacaggtactttggcccagtcaatcaaaggtaggagaaatggcttctttctatactcagactcagaatattgacggaaatttggcttcctacaacagtagtcctacaggagcgaacagtttagaatgaatgaaatgacggggatagagaggtgatgtctctattgtcaaccaaatcagtgacctgacataacctgttccgggcagcttgcctgtagctaagcatttaactggtctcttacaggagaagcaggaccctagtagctagggacacatctcaaactgtgacccatgaaccagtaggtattggcgtcacctgggatcctgacgttagtctctgtcaatccttctctttagttcatctattctacccaaagtgatctcatcatctggtatgctgttagcagtttcttacctgtatagtatcttccaaataacatgccccaaaatcccaaagttttacccctactaattacagcaatgtctcttttattcttcaccccctgacgcagatattggcgtcacccgagagcatgttagtaatgcagaatctcccctccccagaactactaaatagcacctgaaattttaacaagatccccatgtgattcatgtgcacatcaaagtttgagaaacactactctaatgatctcctggtatgcagaagcagggagaatttcagaggcaagatccttaatagaaccacggcttttctcatttcaggaaaccacttggttaaggtgtatgactatcaagaagatggttcggtacttctgacttgtgatgcagaagccaaaaatatcacatggtttaaagatgggaagatgatcggcttcctaactgaagataaaaaaaaatggaatctgggaagtaatgccaaggaccctcgagggatgtatcagtgtaaaggatcacagaacaagtcaaaaccactccaagtgtattacagaagtatgtaatcccctttggtctgtttgttgtgaaattaatcagtatttgctgttctggtgagctttttatctggggtgaaagtggaaatagatcctcaacagtaatattatcgcctgttctcttaatttcagcttgcctcttttaaaatactgtaagatacttccctcaccctattgaaaaactacagccagtcctgtaaaattttgtttacctttgggtgggctccatggattcaagcaattcagcactgagttgaatgaaggggttggggagacagaggtgatcataaggtgagcagcagtgagaactggagcgcagtggagcatgaagagtatctagtcttccttctgttccagatacttcctggtagttagactacatgggcttccccaggaatcctgggggacttaagagcatcaagatgcattgagttttggcgcaaggatcttcccttgccctgccacccacagaggaaaagcctgctgccctccacagcggcattattgcagacaggcaggagaaaacgaaccaggaaaaacaactttcgcaacctgaaggtttgtctctccttttccctacagtgtgtcagaactgcattgaactaaatgcagccaccatatctggctttctctttgctgaaatcgtcagcattttcgtccttgctgttggggtctacttcattgctggacaggatggagttcgccagtcgagaggtaaaagaatgctcttagatgagagatgggaccacctgagaccctcagctttcctcctaccattatgtacccaatggaagagactgagttggtgcttcttgctagtgtgcatagttgggtgaggctgtatttctctgagacaggagaaaggatacttggtgttatcacagcatgttcacctgtctcaagatacagctccctctgtgaaaaaaaaaaaaaacaaaaacaggcgcagtggctcacgcctgtaatcacaacactttgggaggccgaggcgggcagatcacgaggtcaggagatcgagaccatcctggctagcacggtgaaaccccgtctttactaaaaatacaaaaaattagccgggcgtggtggcgggtgcctgtagtcccagctactctggaggctgaggcaggagaatggcatgaacccgggaggcggagcttgcgtgagccgagatcgtgccactgcactccagcctgggcgacagagcaagactccgtctcaaaaaaaaaaaaaaaaaaaactattttaagtaaacccttacatacagaaaagtgaatcacaagcatacagctcaaaaaaaaaattcacagagcaaatacacccatgcagccagcacataatttaagaaagacaatattaccaatgccattgaagcccctcttgtggtcacttccagccactacccatcctcaagagtgagcattgtcctgacttctaacaacaaggattaactttgcttgtttttgtcctttatgtaaatggactcatatactaagtattcttgtgagtagcttctttcactcaacaacatgtttatgtgctttatccatactcttgtgtatatataaaactcttattgttatttagtattccattttgtgaatataacccaatttattatgcattctaccttgtgtggattctgtttcttttttgtgcagcttcagacaagcagactctgttgcccaatgaccagctctaccaggtaaggggatgaagaataaaagagacattgctgtaattagtgggggtaaatctttgggattgaggggcatgttatttggaagatcctatacaggtaagaaactgctaacagcataccagatgatgagatcagtttgggtagaataaatgaactaaagagaaggattgacagagactgaggtcaggatctagtgagcacaagttgaagaacacactgagagggacacacgaagaaactctcgacaggctgggcactcactatagacaggccatggctcatgcctgtaatcccagcactttgggaagccaaaacaggtgaatcacctgaggtcaggaattcgagacaagcctggccaacatgatgaaactctgtctctactaaaaatacaaaaaaaattaaccaggcgtggaggcgcgcgcctgtagtcccagctactcaggaggctgaggcaggaggaccacttgaacccaggaggtcgaggttgcagtgagctgcgattgtgccactgcactccagcctgggcaacagagaaagactccgtctcaaaaaaaaaaaagagagagagagaaaaagaaaaaagacagagcctccatctccttgtcctctttccatcctcaggaccatgaagtacccactccaaattctcacatataaaaaacattcaataaacatgcatcaaattaattaatagaggatggaaaaaatgacttatgactgtgctgtcctttccagcccctcaaggatcgagaagatgaccagtacagccaccttcaaggaaaccagttgaggaggaattgaactcaggactcagagtaggtgggttcttcaatgccaattctaataaaggacccttgcatcaactgccctcgcaattgcttctaagtctagctcccttccctaagcggctataagcatcagactctggggatcagggattgggacgtggtttggggtactcttttctaaaaattctggggccatactgattgtcttggcctaggtaaatatgaattttatgtatctgtaaatcctgtcagagcagggcctcaagccatagagatgctgaatattaatcttaacctacatttgaatttctcattatctacactattaacattttgggctaattaattatttgtgatgaggggctagcctgtgcattgtaggagttatggaagcatccctggcctctctccaccagatgctggtagattgtccagtgtgacaatcaaaaatgtgtccagacattaccaaatgtgtccaaacatcacctccagggcaaaatcacccttagttaagaaccactaacccatattaaccttccaatcaataaatcaatcagtcagaagttatgatttaattaatctatctgaagtttctatcaggaagacagggttgaaagcattatttgttttttttgaacaaattgcaatttttcttttttcagtccaggtgttctcctcctattcagttcccagaatcaaagcaatgcattttggaaagctcctagcagagagactttcagccctaaatctagactcaaggttcccagagatgacaaatggagaagaaaggccatcagagcaaatttgggggtttctcaaataaaataaaaataaaaacaaatactgtgtttcagaagcgccacctattggggaaaattgtaaaagaaaaatgaaaagatcaaataaccccctggatttgaatataattttttgtgttgtaatttttatttcgtttttgtataggttataattcacatggctcaaatattcagtgaaagctctccctccaccgccatcccctgctacccagtgaccctgttgccctcttcagagacaaattagtttctcttttttttttttttttttttttttttgagacagtctggctctgtcacccaggctgaaatgcagtggcaccatctcggctcactgcaacctctgcctcctgggttcaagcgattctcctgcctcagcctcccgggcagctgggattacaggcacacactaccacacctggctaatttttgtatttttagtagagacagggttttgctctgttggccaagctggtctcgaactcctgacctcaagtgatccgcccgcctcagcctcccaaagtgctgggattacaggtgtgagccaccatgcctggtcttaaaaccagtttcttatatatctctctggaggtattctaggcatatatgagcacattctcaagtacatattatcctcccttcccctatcttttagacaaatgatatcaaactatacatcttgtgagattattgcataccattatatgaagataccattatatcctttttaatgcaaccatattgtacaaatagactatgatttatttaacctgttatctatcagtggatatttaagttggtagttggttccaatcttttgctcttacaacaattctgcaatgactaacattgtataaatatcatttttaaaaataattgcattgaagcataatgtacatgccataaaatccacccatcttaagtgatttcacctgttctcagaaatttttagtaaatttaactaattgtacagccattaccataatccagctttaggacattttcttttttttcttttcttttcttttttttcttttttttttttttttgaagtggaatcttgctctgtggcccaggctggagtgcagtggcgcgatctcagctcactgcaacctccacctcctgggttcaagcgattctcttgccttggcctcccgagtagctgagactacaggcacatgccaccacgcccagctcattttttgtgtatttagtatttgtgtatctagtatttgtgtacttagtagagacagggtttcaccatgttggccaggctggtctccaattcctgacctcaggcgatccacccgccttgacctcccaaagtgctgggattacaggtgtgagccaccgcgccaggcccgtaactgtattttaatatagccattctatggatttaatatggtattttattatggccttaatttgcatttccctagatactaaccatgctgagtgtcctgtcttgtgtttattaaccattcatatatttttagtgaaatgtgtatcaaatcttttgcccatttttaagttgacttatttgtttgtcttcttactattgggttgcatatgtttttgatataagtcctttatcagatatatgatttggaaatattttctaccaatctgtggtttgtttttcttaatggtgtcttttgaagtgcaaaaggtttgaattttgaagtacattttattgattttttcttctatatattgtgcttttggtatcatgtctaataaatctttaccaaacccacagttacaaagattttctcctgtcttctttttatactttttacagctttatggttttagctctaacaataaatgtgattttgaacatacataagactatttgtaacaaacacaaataaattgaattgttgggca

SEQ ID NO: 1390 - DNA, 32767 bp, synthetic construct
  source 1..32767: mol_type = other DNA
tgctttctcaaaggccccacagtcctccacttcctggggaggtagctgcagaataaaaccagcagagactccttttctcctaaccgtcccggccaccgctgcctcagcctctgcctcccagcctctttctgagggaaaggacaagatgaagtggaaggcgcttttcaccgcggccatcctgcaggcacagttgccgattacaggtagggccgacgtgtcgacggcagggaacttctagaaactctttgtgtatgtgtaggggagtgggtgtgggtagtggagggtggtgaggggctggggtctccttcaaatcctgccctcctcaaatcaatgggcaagtgagcagtgaggggtccggcccggtgctggcatctgctccgtcacagccgagttgggcatcagttcagagccagctgctagaatacacagctcctccaggtacagatttttcgagtgataagagaggaaggaagaaggaagcaagagagcaaccgaggcaggcccagggtagagaaacggagagggagtgtttcacagaagctggacaggatcggaaaatgtcagccaggccatgtttcgtgctgcgacgttctagtcccttcagcttctttcaccctctggctggctccgtcactcagcccctttctttcttcctttgccaacaaagaagattttgttggtcagtcaaggtcatggcctgaaacactccaatgggcccgggagtaagtggggtaaccaaggaggagaggggcacaggcaggaagcaccgggtggcagcctccacagcgccttcgccacctcatggccaagcgtccgtgtctaggctcagccttgtcatggctgtccccacacccacgcctgggactgccgggtgacgcaccatcccaggctccgtgactcaccccagcctgccccttaggcggccatctagcccagccagagggcccggcattgacagaacacggggcagatgagacgatgtgcctggttaagtcaccaccacgagcagcgcccagccaacaagagtgcttgctcctcacctcattcccgatcgtgggagcccagctttgctgcaagcctttagcttccaccatgttttctagcccaggtaatgaggaagaaaaccagtgaaaagaggacaggacaaactgctcagggggatcagcctcgtggcatcttcctgagaagtggggcaggctgaatttcaatctaaagaaacagggaaggtgaagcaagcaaatgtcctcggcccacctgatcgctcctggtaactcacctgggtgtgggaatttgtttaggggccctgttgggagggcaggagaggccatgggcacttctgctcccaccagggagccaggcacagcccgggccagcgcctcgggggattctgaggcccgtgcagctgcaggggtttctgtcaggtcacagctgttttctcagaaaagccttgtggggtctaagtcacacacacagtgtggcagagtgagggtgcctgagcttgctcagagcagcccatccttgtgtgctggggacaaggggacccagaacgctggaatttagtgacttcaggggagacagccaggggcaatagctccagcctctgagcttcaggcttgagacaccacaccagggagctcatataacctttcagggtctttacctgcagtttcctcactggtccatttgtgttcggcttggagagaccaaggtaggggcaaagtgaagttagaaagaaaaatgaaagattgttgggtggcggtggctgccaagcgtggtaaacagaaccccacccagcagacaagatgggggccgtgcctcatttccacaaatagggggcaggaggagaaaactgcacattggctggattttttgcttctcagtgccacttactttgcctctatggagactgatattttagctattttagataaagctaatagacaaaagtgtttcaaaatatcctagcccagaaacgaggtacggtaaggcaaagcgcgactcagagaggccttgacaccgagggctgcgatggtgcttttgctgcctgaggggacacctccacagtctccccggaggaaaggccgcacatagaatttcagtcaggtcttctctcttttcttgctcagttaagtgacccattgcatacatcccttttaaaatgtctactttttactaagctgttgcatttgcatttctttggaaatgcccagattattaggatcaaagcaaatgatgacctggtctgtccacatgaggaggcctccctgagagagaatctaccaagacagtcaccagggcttgaggccagaagatcctaagatggcgtgcctagtggcatgggcacacttgtgcctgcagagccctcagtgcctctaactccctactctgcagtagccaagaatgcacccagcggtcagtgtggtgtttgtcttttatcagtgaggagatggagctctgacatgcagccttggggaatgcaaagcttccaggcttgtgagtggctctgcttttaggaaggtggctggacgtggtagaaagagccaggctaatttcaggtggtgtcccagtgctgccgcttcctagctgtgcaaccttaggcaagttacttaacctctctgggcctcagttttctcacctctaaagaaagacttgtaataccttctttgcagagatgtgacaatgagaagtaatgtaatgtgtccaatacatagtagacagccaataagtaaacattgtatttactattactattattacatctcggactgtcttcttgttctcaaaacaggagatggaaacccatggctgggattcttcatttgctttcaatatgttataaagcagcagtgggcattttctccatctgttgcaatccaactcatccctcttctgatttctgggcacacccataccagcacagaaacataacaatgattgcagaggtaggcccgatagtgaaaaagcagcaaagctctggctggtcataggatgactgttacatccaccattttcattttttaaagatacttactctgtaggggaatattctcccgaagtaaaaacatgtctgaaaaaatatatgcaagatgggggctgtgccccatttccacaaatagggggcagggggattggctggatttttttacttctcagtgccacttactttgcctctgtggagactgacattttagctatcttagataaggctcatagacaaaagtttttcaaagtattactttgaaaggaatcagaaacaaaatccacccagtcatcactggtccgggtggccacctagattctgaagccaaagggctattgtgggtgcacagcgactgagtatctaaatgcaaacttcttgaacactaaatctttgctaaaattgctgggaggtgaatgtgaggcaagcttttaagtgataccagtacaaatttttcatcaatggcattttcaccatcagattgtttcgccctccaatcgcctagctctgctcatccaaatgagctatttcatttttcaattttagcgtttctcaggcttactagcctagagatcacatctgcttctgctaagcatcccccagaaacggtcctggggagctctggcttaggtgaataaccactgctgtatttaattttaaattctttgtatttttgcttttgttctttaaaaaaatacatgtaattattgttggatatatacttttccagtcaaaagttacccagcattgtgtcttgtgctttacttagaagggtccagttgccctgagggaactctcttagattagagttgtccaaacacgcactttgggaatcgtttctcccaagccttatttatctaaggcttaggaccttatataggtcagataattgatttaataaataccggaaatagttcaaaataaatttcttagctctgcttcggccaaggctaatttttattaacactaaagtgatggtgttcgtcactttgaacaaacattcaatatggttaaaaaaaaaaattaaaccggtcattagacctgttaatcaaaacaaaatgatcgctttagtcagcgcatgtacatagtatgtcttccggtctaaaaaacaactttaagttccctgaaaacaaagacgcccctgtcacgctcacagctctacccagcacttagcatggtacctggagcagagtcaatgtgcaataattatcaataagaattgttgaatgcactctgggaggccgagacgggtggatcacctgaggtcaggaatttgagaccagcctggccaatgtggtgaaaccccatctccactaaaaaatgcaaaaaattaactgggcatggtggcacgtgcctgtagtcccaactacttgggaggctgaggcaggagaatcccttgaacccgggaggcggaggttgcagtgagctgagatcgtaccactgcactccagcctgggcgacagagcaagattccatctcaaaaaaataaataaaataaaataaaataagaattgttgaatgaattaaaaggtgagtgaatgaaggaaatctagatgttttcatacgattaaattaactttaatggtttatttggtgggtatattgaattggcattgtttggacctttcctctagagaacgtagtattaaacaatgttattttaaaaacaaaacaaaaaccagaaattaaaccagtggaggggacagggcagtttgagtgattagaattatttgaaatgagttgtaaggatggtttaagataaaaccctgccattattaaagttttctggttggaccatatgaaatttccactatttgtttatttcagatctacaaaaaggataatttcatatgattcaactaacattataactaaaaataaagaaatatgctcattttttctgattaggctttaacaccggaggaaagcggaaaataagcaaggctaacactgttggagattgttaactaatgaactaaaaataaactaatgaaaggcatcaggtagcaaaagactggattatagtataaaccacagtatccaatcacccagtttcctcaaaatatagaaagaaaaaaaagcaagatacttactattagtctggtttgatccaggttactaaataaatatttcaggtagccaacatttttctgttctcttagtttgagatattttagtaaagatataaaaatcactgacggaagttaaaatttaattaaatttttttcaaaattcctaccaagccagcccaataatattgcattctcacttctttatattccaatccaacattttttacaagtgtaaaaaattttactatctttttatagttaacataaaaacataagtcatatcataatcaaaacataaaacatatcattaaaaagtttcaagtgctttttttcttaatattttattgtaagcattgttttcatgtttagcctttgtgattgtttttaattgctatgtaagcttccatagcatccatgcatcgtattttcttcactatttccttattgttgtacatttggactatttctgatttttgttattttagctaatcctacaagaaaatctttacatatgtagcttttgttactttcttgggcaaatccaggaatgacatttgaaagaataggttaaagtaaaacagcattttgcaggatgctctagacttctgttgaaaacaatcccatcaaggaaagaaaatgtttctctaactctctgttaccatctccaagcctttgtgtctcctctggagcaggcactatggtggaaggagaggaggctctggagccagaagtcctgagccgccttcccctcccgacctcagagccctgttcttcctctgtgagatggcggcaatggtgcctcttcacgcaggggactgtggagtggagatctgattcggaagtgcctaaacacaaaaggcacttggaaagccagaaccattagcatgtgtgcctcagtttcccaatctgcaaaatagaatatcattttcccaatgcaataatgggggaacactggactgacatgctttttttcttcctctgtcattacattgcagtgtatacttgggcagaaatttctctctaggctttagttttagcatctgtgagataaattatgagaggattgaacatcccttttagctacaaaatgagttgtgtgtggtcttgaaattacaaagttttaaagaacatttaatgactcagcccccgatccttaccccaccccacaggtattggctctcagaattcagagcctgaacttccttcttccttgcctctccaaatactttttaaatctgggctctcaccttaccacaatatttttaacattctaagtgggagcctctgctgtgaaaaatccaaggacaaagtccatcccttctgcttgtgcgtcggctgcagatttattgggggccgtgcaaggacttcggttggtgagaacagacttgaagagaaagcaaattactgcccgaagcagccaaattgcagtggtgaaaatgttaggcgtttgcactgtccactttgcttgcctgttttgatttgtgctactcagcaactaattttcaggctcaaggagaaaaaaataaatagaaagcattagaacaaagacaagcaggacccttgccagtccagaccgccgttctctgagtgcagccatccctttacagttgcaaaatgagtttccatgcctttgtttactggatcctcataaccatcctatggcaaatagcagaaaaagcagcaggatctatctcttctcgtaaatgaagaaagtgaggctcgtaggtctggtgacttgcctacgagtagaaccaggcctcaaacatggtttctcggggccctcgtacagggtctgcaccttgaacagtgtgcagccgctcgcccaggtccgtacaccatcatatacccaaagactggattctgaagcctacttctaaaggtattccccttactaagcacttactcttttcctctcaatttttacagtaaaaaataattattttgatgctgaatattctcatttaatatacattttctgctgagtatgaatattaggttattaatatagaactatatgtttttctagaacgtattatgatggttctaaatggagaacttacattttctccaaagctgataaatccatagtttccattttactctcagaaaatgcatctattctggaacttccttagagggatgcgcctcaatttgcagttcaacccactcctgtgtgtgcaggtatgcacaccgctcaccaccccactgtatgcagaggttataagtaaaatgtaaattaaatcatatttgagaggttttgccctgaataaattgcctgtaattaatctgcttggtaagagtggatctccatatggtgtgaaaggttttatgtgtatgagattctctaaaagaacagcacaccgtcacgcacagactctgaattgagatttgttttttcactaactcctccaggactgggagagttatctttgaatgacaaatgtctataatctattcacaattatttacgtcatattttagcctggggttcacctgcaggctcggtgcaggtagtgcaaatccttgtgctgttgactggagcaaagcaaaagatggttttctggtgctcagaacaaatgcatgaagcattaaacagctggagatgtgaatatctgagactcttagtgggccacccccaaagctggctgagaggagggttgggaagaggggaagtattcaagtgctgcagcaggatgtctgtgatgggctgtaggtgctgttgcctttgccaagccatggcaggtggggaggagggctcagaatggaaaccaacatcaccatttaagattaacaaacccctacccccctcttttgctgtagatactagagtctactgtgtcttcttgtattttgctaattccccaccatgcaaaattgtactggctccaagacagaatgtgaatgacagccctcagttagacctgccctttcatcatctgggctgggcatgatgggagagaagtatgataggggaaagagtagaaaagacaggctgggggagggggtagaggttgcaacctgttcccctgggtttactggcctgagctgcctgctgcagggagaaggcagctgagccaggtgacccatcacgtgaaaagcctgagcccaagccccaggggttgcaggtcagtgtgggtgttggcaatgtgcacgccagcatgtatttacccataggctctggtggttgcaggtgtctgtgccccctgtgggcatatgctggcgcatgtggtgctgtgtgtttgtaggtgtgtcctgacatgcatgtgcaggtgtgcatgtgttggtgtgtgtggtgcactgtatgctcacctgtatgctgatggatgtgtgcctgcatctgcagggatgtgtttttatgtgcagcagtgagtgattttgtatgtatggtgtgtgtgtttaggaggagtttggtggcagcaggacagctccatagaaggaagggcaaacattacttcaactcagggctggcagtctgggttctgagtaggtgagcagaaagtcagagatgtcacagatcatgttccagggattctgtggagaagggagacaagaaaacctctgtcggatcatggagaggtgtgagtggcttcttcatagctgcatagacttttcaggttggtctggcctgactcccgtcagaggtctctcatcttccaagtaagcctggggtctttccttttttgtagcttccttcctctcaattctcccgacttagaatgcagacgccactccatcccccacctgcggaaaccctgttcaccccttaattctaagcccagatgtatggggatctcccagacccactgttgacattgttaccagcgttaaagtgacacaagcaggtggaaaattgttgttctcagaattcagggtcaaaaacccaacagaaatagttccctagagtgaggcgttcccagagaagagactcggcacccagatagtttcaggaacatttatctgtcagcggaaaatgtcaacagctccccaaattctcaccagttcttcccacagtgtccatcctatgtattttggctaaaataggcaaacacgcatttaatcttctttttttttcaccctcggaataggttggcaaacaatccaataaggtggttcccaatgacctactttgcccatcaagataaccagatggataatgatttcttttcttttctttttttttttttttttttttgagacagagtttcgcttcgctcttgttgactaggctggagtgcaatggcgcgatctcggctcaccacaacccccatcctgggttcaagtgattctcctgcctcagcctcctgtgtagctgggattacaggcatgtgccaacacacccggctaattttgtatttttagtagagacagggtttctccatgttggtcaggctggtctcaaactcccgacctcaagtgatccacctgcctcggcctcccaaagtgctgggattataggcatgagccaccgcgcccagccatgatttttaatatctgattatttaaaccatctgacaggccacttgacttaccaattgagtaaatatttaccaagcacctctcatgtgccccaaatcaaaccaacagtcctgtagatggttggctcaaccagcccactggccaggccagtgttttgaagatgaaggttaaatgattgagagcccataagcacaagaaagtgtccctggtcccggaaaccatgttctcaatttttgcaaaaaagtctaaatttgtcttcaggctcacttctttatggtctcatctaattttcatcattgtgtggggcctgtgctaatttccatgctgagtttagtagcaaaggaagcatatatggaggataccacccaggacttttgagtcagccaagagagcttcagaaattcctcctttgatttccacagagtcgagagaaatctttgtcttttctcccacttaactatcaacacttcaaagcccagacctacataaaatacacaaatgctttctggacaaaatgaatcttgtccgttttctttgggtttcattgggaacaataaagattgagctacaaaaggttggcaaagaggattatcctttttctttctattaaacatagaggcttcaaaagaacagctcagaaagtcaaataattgtatccaccatcgctcacccatccatctccctgctgacctggcctgtgaaatcccctttaaaaacttagccagctctcacctgcccattgcaaatgctgtattgttaaatgttcccatctataattccatgagggaggctgctataaagcaaactccttccatttcaacggagcatctcgtcgcgcaatagctctttggggtgggagtggtggggtgcctctaattttcaaagctttgtaatctcttgttggaaagggagctacttggaaaccagaaatgggctgtgaatagagttatagccacaagctcttgcagtccaaaggggctggtggggaggacacggagggtaagattttggaagccatttttgatcttcatgacaatttcttgattttgtcggtttggaagacacatctgttagtttttagctatggctgtaaacacaaagtctcagacttgaagctgacctaattcctcgtttggtttcagaccatagcttcctcagaaaattcctgtcagccattttgaagagcacaaaatggctcctatatgccaagagatagagagaatttgctatttagggatttttttttttttaagatagggtctcccttcttcactcaggctggagtgcaggggtgtgatcacagctcactgcagcctcaaaatcctgggctcaagcaatcctaccacttcagcctcctgagccattggaaccataggggtgcaccatcatgcctgactaattttttctttttttgtagatacaggttctcactacgttgccctggctggccttggaaactcctgggctcatataatccaccagccttggcctcccaaagtgctgggattacaggaataagccaccacgctgcctatttagagatttttaaatttggagttgaacatttaatagcagcattcaagtctggaataatttcagttaagaaagaaaagaatagaaatctaaccttctaattggccaaccatctaaaattctatgtggaatgatcaacaaaggaagacagtattgagttgctgggtcctctctacggggtcagaaaagaggcctggttcacctggctctccatgttttccctgtagagtccttcaaacccatggtctttctctaccaactttgaccctgggtcatcatctctctctccaatcaccattccttctctttgaaggttaaaaaaaaaaaaaattcaggccaggcgtggtggcttacacctgtaatctcagaactttgggaggccaaggcaggtggatcacccagggtccggagtttgagatcaacctggccaacatggcaaaaccacatctctactaaaaatacaaaaacaaaaacaaacaaacaacaaaattagctgggcatggtggtgtgctcctgtagtcccagctactcaggaggctgaggcaggagaatcacttgaacctgggatgcaggggttgccgtgagccaagatcacaccattgcactccagcctgggcgacagagcaagactccatctcaaaaaaaaaaaaaaaaaaaaaatcagagggaacatacaataagccatatttaatggagttctgaattatgtaaatttgaaaaaaatgcaatctaaaaattcataaggtctcactatttgtagtattcaagataatgtaagattttacatttattcctatgataaattaatcagaattttgcaaagtctttaggaatgcatctctcatgtaaagtgtagctactttgtagtcagaagtggcctgtggcaatatcgtgattaggctggggtaggggttagggttgctgccacttagttctaccttcagtgataagaagagtagacagcaagccttggcaacatagcaaaaacctgtctcttctaaaatacaaaaaaaataaaaaagagagagagagaaaatattcgctgggcacggtgacacccccctgtagtctcagctatttgggaggttgaggtgggagaaatgcttgagcctgggaggcggaggttgcagtgagccgtgataatactactgcactttagcctggacaacagagtgagagaaaaagaaagggaaggggaggggaggggagggagaggagaaagaaaaaagaaaagaaaagaaaggaaaggaaaagaaaagaaaaaagaaaagaaaagaaaaggaaaagaaaagaaaagaaaagaaaaggaaaagaaaagaaaagaaaagaaaaaagaaagatggcgtctctctgggaagattttctgtgaccagagtgggactgggctggtatgtcagaatctcggaatatttgacctggaaagtattatagataccttcaagttccacttctggattttaccaggggagaaatgatggccctagagaaaaataatacagatcaagaaattgccatgtcataagcaaatggcaaattcagcccttaaacccaggacttttgattcttgctctagctgcctgtcctctgggctgacaagctgccctgttataagtaaatggcacttctggagccagccacttgggtctcaggtgtgtgtgatgagaccctacactagaatgacagccacaaaagagctgcaggtggctgggccaccttagctcatcctgtccatgaaggggatggctttcaactgtttcagggggtacaaaaaggcattggatcatccccacagtgaggaaacccctccccactccccctaccagatagctgtcagtgctgctgagaagcctaccttggtctccctccactccagcttctgcaggccaagtggccattgttgttagattttttgccctgttgtgccataggccctgacctgcctacctgctgggcaacaggctgccggagggcgaggggcagcccttgtgccttgccccacatgagctgcactcatgctgccttccagagaagatgaatttagccttccacctgaatcctttcagaaacgaagcaggcaggcaggcaggcagcaagaaagctatagacacacacatacatgcaaacacatacaagtaaatttagccagagtgcttttagtctataaagatgttcagtaaaagtttaatgagtgaagaagtgacaaaaataccatgtattattagtatatctaggctcagacaatgtcttatggtatgtaaaccgtatctcaacaacaacaacaacaaaaaaagctactcaggaggctgaggcaggaggattgcttgagcccaggagttccaggctgcagtgagctatgatcgtaccactgcagtctaggctgggagacagagcaagaccctgtctctaaaaaaagaaaaagaaaagaaaatgtcagctatgtacaagggaatcttcactcaccagaggaagcccttggaaggttttgtgcaagagaatattataataatatgtaaatataggtagaatatttaaagaaaagctgtcgtgagttatttggtattgtgaggactcttcttctaatctacttgttttcatgagtatgaattttcatttattggatttttgtagaatcgacagatatattaacttttcaaaaatagagacgtgcccagattttcctgtcagttgttcaccaacggatgagatcccaaaaggtaggcaagattgatcgctaggttttagaagggtttccttttaagggctttttaatgaagcccattctaactgagattcccactgccccactgccctagcgtcccgttaatgacaaggagaggcagataaatgcctctttgtgccaataaatcaatggcatctctgcttctctgctgggactgtccaggaccatggtaaccataaggacagtgacccactgatcttaggccttggcaggcaaactagcctttactagtgatggtgtgtcctgttaggctatgccagctggggagagaagactaaaaccaatgagagaaaaacaagtaattttcctgttagtgaagagtgcctgttttaatcatacatttcatcgtcagaaatattatcagagatagaaataaaatgcagaacatagctgcgcattaattcactttcagtgtattttctgagcaagcgattgtatgtcagcggctgcattacagttgctgctctcaaagtactcacatttctagaggagagggatatgcctggctggtaaagtgatagaggggtggtaactgtgaacacttgtgatgccggggcttgttttatgtgctgtttgcatgcattaggtcaactaatcctgtggcacttttattgatgtccccacttgataggtggggaattcagccctgggggtccatggctagcaggagcacagccagcctttggccccaggcagcctgccctcgctccccccgccatgaaccgcattgcctatacacagcaccccgggagcccagaggtaagggtctccctcatatttgcttgtcacggacttggagggaggagttgaggtttgtctgccacatggagaagggaattagcaaagggaagatctggtggtaggaataggattttctgccccagaaaaccaggaaacaccagccgtgactctaatccctaccccatccctgaaactcacttcccaccctcaggctagatgaagaggcgggggtaggggggcatggcctttggcaccctaaccggtagcctacccctcctccaggccaagtcctcacctggccccatggttcctggtcccaggcagaccctgttgccacctgctcagatgtgtcacccttccttgtcccaaggacctggctcctaaacaatgtgttcagtgacgtttataacaaaggcactcttccccaatctatgttcagcaagatgttaatactatactacaaaaaagaaggaatgtacattttggaaacagtagtttaagtgcactgaagaagggttttgtttgttgttgtttaagtgcaggacttttccaaaacttctgtctgcaaatgtgcattacacgttcccagggggaagggaggaagatagagttatgcaatgcaatggaaattaatttcacccctcttggcatctggtttttcagggaacacctattaagtgacctgcagaatacagagtgagggctctaagaggaagttatgagaaagctgggctagaggattaaaggaaagcatcctgggaggtaggatatgaatgggtaggatttaatgcaaaaaggaggaggaggaaactttgcaattcagggcatggcctcagcctgatgacaaatgccccagggggacctcctaaagtcggttcattttgaataccggcaggagcagacgcaagctgccacccctcctgtgtaaggctgaggtagctgttccacagtttcctgggacttgccagcaggatgaagttccagttgttaaccacagtagctaacctcataatgattccttccttcacctgcctcacttcccatgttcttactgtattcatttcctagggctgccttaacaaagtgccacaaactgagtggtttaaggagcaaaaccttattggctcacagttcggaaggctaaaagtccaaagtcaaggtgtctgcagggttggttccttctgagggctgtgcaggagaatctgtcccaagcctctccccagcttctggtggttgctggcaatctttggtgttccttggcttgtagatgcatcatcccaatctctgccttcattttcatgctgcattctccctgtgtgtgcatggctgtctctgtgtccaatttttccctttttataaggacaccagtcatattggattagagcccaccctaatgacctcatcttaacttgataatctgaaagcaccctatttccaaataaggtgacattcagagggtgttaggacttcaatatcttttgaggggacacagttcaacccataacacctaccaacggtttctggaatcatctctcaaaataaactatctaaactctaatctttgtttcagggtcagcttctagcagaactcaatgtaagacacccttttaaagatggtacctcagaggtacagacagattgtgaaccttccctagcacagtgtaacaagtcccttgcaaaaatcctgatttgagtcaacattgtaatttcttgcttaaatctaagaatatgcctcccagcttcttccaagactatctgggggagttgtttctagggtggctcaatttattcgttttgaacgctgatggccgtgcaccacaccgtggctcaatgggtgttgaggacacgttcacatgcaataaatgcacagggctttgccattaggtggcattaggggaaggacacttccagcatactgcagaggcattctcttccagcctggttgcctgtcaagcacctgctgagatgactggcccagacggagattgtggggttgctgagccagccctgtcccctccttatctccggaagatggaataaatgcgtgtcagaagggagggtgcctcccatctcgggagcaccggggttgcccttcagaaaaacattgcctgcacattttgtagtcttgaaatgaatctgagtggcaattcaagcgggcagagcttgttttggattttagacagttctacctgcgtgctcctcttctctgctccagctctgacatctcggctccacatacagtggtctgaagtggcatacggaccctgagaagaggagaggcaaaggtggcagctgtggctggcccctcctgccttctggtctccttggctggtgagggaagaacaaacacagttgtgtttccaggtcacagctgccagggctccacctgtggggtgggtggctccagttctgttctgagttaagaaatgctgcaaatacgttctccttgaaagagacactaggaattgaccatttctttctgcagctttctgtagccaataagcatttgaggaactggagaagggttcagccctgaattgcaagggaaaactgtgtgagtgtgttttagttaagaaaaaagttaattctagtgagacctgcttgtttacaaaacagatgtataggccagacagatgtacagggatgaccttgactttcttttgtcattgcaggaaggtggggtatgtatgacccctggttaagaacaataggaggccgggcgcagtggcttacgcctgtaatcccaacactttgggaggccgaggcgggtggatcacccgaggtcgggagtttgagatcagcctggccaacatggagaaaccccgtctctactgaaaaaaaaaaatacaaaattagccaggtgtggtggcatgcctgtaatcccagctactcgggaggctgaggcaggagaatggcttgaacccgggaggcggaggttgtggtgagccgagatcgcgccattgcactccagcctgggcaacaagtgcaaaactcggtcaaaaaaaaaaaaaaaaaaaagaacaataggatcagaagtcggatggctgggtccatatatacctccacctcttctgactcccagttttccatctctgtttgaaaatgagtctgtaagcctctccccacctctgcctgttcccatcccatagcaccaggctgacttaggcagccacacagctgggatgggaagttggcctcagtgagcagatggtacaggggctgagcttaaaacaaaaatcacaaacatttcttggggggtatcctcaaggccgataaccctcttactagagtgaaatggaaaaccaaatgtgattgagctgcctgagcgataaaagcatttgctgttattctctgatttgctctgttcatggagagtttagtcataggagtttctattctcagaaactcacagcacatcacaatacgtagctcatttgtcctcaaaataattctgccctgcataaatgggtgtgtgtgtaggggggtggtaattataagaaaccatgtgtgttagaattgatgtcagtgctttgagatcatcagataaaagctaataaacaacacatatgtgtacaggccacctctctaattcataccagaagcgctggttgtaatcaaagcatggcatattttattttaaactattttataaataacctttgaaactgtgttgattgtgaaagccaagatctgatgtcctgttaaggaaagatgaaaataggctagaattaaagagcaatatgagtctggataaaagtgacaggaattactgtaggacaataaagcattgggtcatgtcaagttttcatcacatggagaatggaaagctgcatcataaatgctctccacctaatcatcctgagcattctcattttagtgcgatatattgtcctcttggaagcaataatctcatttaggtcatgagtaaaataagttgggttcagcgtttccatttcaagatatagagaatatttctccagtgcagcataagaaatagaatatcacccaggagaagctttacataggcagtgataatgtggaaaaatctaataaagagaacccacgtgccccagggaggagaagccctctgtgtgtgtgattgtcgtcaggtgagcagttatggcacactttgtagttttgccagtgcttttatgtaaattactgtatgcaaaatccacagccctcggggatgtgtgggtatggcctctgttactgacagaggaactgaaacttcaagaaggcaagtgatttgctcaagattggttatcagtagagttggggtttgaattccattcttctggattcaaatctaagctctccctctgcacagttacatgtgggcaggctgtgcatgcatatctgtggcctggaggagtggggtgagtaaccttacaggaaggaataccctgcactaaaatttgcacctaagcttccattattacgcctacttttcattttctgtttgttttcctcttagaggttaaattttccattcctgattttaacccaaagaaaggctaagtaaattccaggggccactcttgaataagggcagctggaaaaaaatacacaatgcccaccatctagcttaacaggatgtggacaccttcagtcgtggctaaatctatacagtttaaccctagcaacaatttcccagaaataaaacagctgctctttctggtatttggttagtctccagctgggtcaagtccctcttgatcgaatgcttggagcagggtttctcgacctctgcactaaaacacctggggccagataattctctgtggctgtgggcaccagggaggctgttctgtgcattgtagaatgttgagcagcatccctgacctctacccactagatgacagtagcactccccaagttgtgacaactcaaaatatctttagacgttgccaaatgtttcctgggggcaaaatctgcccctggttgagaaccagtggattggagtcatcatttgtgttgatcaatcactccgtgatgattaggccatgatggacaattcaggctgactttattttgctcattaggttgaccagaagactggcaattgatccactgctaagcactttcctgacacaagctgaaatgatgtcctcaggagccccgtgtgcgcatggcttttgggatggttcttcccaaggaggacagccgtaaaccatagaaagcaaccacttgactctgggtgtccctggtttgcaagtgcctcttgtgtccgccatctgcatttctgtctagatggtaaggttgagggaggtcagtttcagcagaaagtgcaaagagcatagattcatgaggcaatcagacctaaattaaagttttggctttatcactacccagcaacgtgatcttgggcaggtttcttgacctctctgaaactgtcctcttctttataaaatgaagattacctaccttgcagggtcattgggataattaaagaaaatgtgtgtaatgggcccagatggagctaggcccatagcagcactgtaataaatgttttcgattactgtacattttacaaaaatgaatgactgaatggaaaggtagaaaggccaaatagagtgtctgaggcatctccatggaggagggtgccagtggccatgtctgtctgtggctgatcgcaagactcttttgacagtccctgaagcctgtgctcatcttcagctcccttgaggccctcttcacctggcctcacccagtgtccctgctcttctgactcctgagggacctgagcattccaaaatagatgttaggaagatgtggattcatgtagaaggatgtcaaggcattgttggttttagcagttgatcttacctggggtgtgaaagacaaccgaagtctgtgagctgcagtgatagaaatgtgagcagatgggcaggataggaaggcacttcttgacgggagcagcaacagaagccactgcctttggccaggactgggggagacacaacagaacaggactggcagaagatgccacatcccagggtccccaagatcaagctatggcaccatcacccatctacagcaagatctgtagcaggaaccagggagaaaagtctagaccctcagtaaactatgcggccaggacagtccgaggtcaagccgtaaaggaggcttttttggcatcttttttcttctcccttgggcatcatggaatctgtgctgggtaaagaaccttggagatcccctttgccttgactcctttgtttcactggccctcagaaaggagatggcagaatcacaaagctggtggctgagccagaaagatattgtaggtggaattcaggttatggatagggttaggttccccttgaagagggagtactgagtttgttccttggagagtttgcggttctagctctgtaacccaggactgactctcagcccagtgctttttctgttgtgccaggatgcatcctcatcctatatcttattttaactcatactgtttccaaatcaaataccaacaacatttacaacctttactttcttatttatttaatgctccccctgaaagtagtaatttgccactaagaaagcctcccctgccctagaatactaaagaaaacgagaactaagcgaaagaggacctgtagtcagcgatttcactgtatcctatttaaaatgaaatggactttattttctgctttgagaacctaaaacaccacactttaaaagatgatatttatcatatcttacaaggtcaaagcatacttattggggaaaacttggaaaaggtagaaaagaacaaagagaaaataaaaatcattttaaaaaatgttacccccaagactgattagtatgttggtgactgtccttctaggcttggatatgtgcattttatttcgtaactgttctttttacttagcaataaatcatggtcatctctccctgtcatgaactatgtctctacatcaactttagtgcctgtaaaatgccgtaatttattttaccactgtcttttgtcagacatttagatggcttcatgtttggacgcattatgaatagtgtcactgtggacattcctgtgcatacatctgtgctcacatttgtggctatttctttggaatgcactcctggcagtagggttgctaggtctcccctcactgtcagtgtccccgctctccggggcctgcttttttcatcacccgcctccccgtaaagattcctaagttccagggctatctccttctgatggagatctcctgggtgatgtggtacacgtcacccacacccctgccaccagcctgctgtccaacagatggagctgataaccatttaggaacaatccttaaacttctaaccgactcagtccctgattagacttcttgtcttgccttatccctggttatgtcccttctccctcccaacccttacccacttctcagccccatgcaggaggcccagtttgtcagctggccttgctaatttctctcttggcccagccagagatcgtctaggttccttcttcctactctctgcccgctctgtagagtcagactctccacgggatggagatcttcaaggccagagagatgcaaaacctccttgcttcaggatccggagacaagctgctgcttttaagcagatcccctctcaggcaggttcaagtactgacccaaagagcaggggggttgcagggctctagtgattcttgtgtgaccccagcagactcaagctgttgcagcagtcagacatttggtgatacctacaaaatcatctagtccaacctctcttccaacagaactcacactcgatagcttctttgatgaatggaaatccagacttctgggaacactactgtgatgagcaactcactacctgcctacctacctaccttccttccttctgctttatttcacaattcttgccatacaaaatgaacaaacacacaaacaccactactaatgctattcattcatttatttattcaaccaatatttattatttactatgtagcaggaacagtctaggtgcttttgaaacaatcatgaacaaactgaaccacagcagcaacaaaatcccagatcccatatagaactaacaattaaagacggagacaggcaataaacgaggtaaactgaaaaatatgtagatagttgtgatacatgctgagaagaaaaataacacagagaaggtgcataggaagtgtcaggctggtggtgtggggatacagttttgggtagggtatgcagggatgtccttgctaagatggtggcattctagtcaaacccagaaggaagtgagcgagcaagccaagtgggaacctggagaagacggaggtggcagtgcagactggcatgttcctggaactgcaaagaggtggtatgagtgaggggaaggccagtaggaggtgaggtcagacgtattgagttctgggggtttggggagagagtgacagttgcaaacaagcttgaaggacattttgctctaagtgagatggaggtcaaggacttggagcagaaaagatacatgattatatgttttggcaggatcattctagcagctgggcaaggaacatgctgagggggaataagggcagaagtaggcattacttagtgatgtttgttcaagaaacatctgttgcgctcctatatgccaagcactgcgtaggtgataaggattaaacgggagcacactcttcttccctctggtaggttactgtaacaactactcccacctctgtcatttatgagtatttacccagtcccaagctctggggtgagcacacccgtccattattgcatttattcctctcagcaaactgtaaggtaacaacctcaggatatcctcattttacagttgaagaaactgaggcttagagaggttatgtaacatatcgtagaccacatagatactaggtagacagccaagatttaaacccaggactgtctcactccaaagcctgcaatactaaccacaatgctgttgctggaaactttttcttacgctggactttgaaagttcacctaagacagcatgagaagtgatggtatcttccaggcagccacctgggccaccagccctcccctccttgggatctgccttcccactttgtctgaattgagggtccaacactgctcctcggacacaaggtccaggtggggagagaacagagtccagcccagccaaggcaagtcacctgggctctctggaacccggactgctttgctgtagagtaaagtcctggaataggtctctaaccctctttccagctctgaaatccaaggcgtatgtgatctgaggtaataattgtcttgcctctcatgcttggtttttgatgagaccttcacattctttaataaacatttatctgtatccaggaattataggagatacaaaatgccgaggaatgcactactcatgatcttttttgatccttttaacaatccagagacatgggctgtgtaaagccacagtgcaaaatacaattaggaaaacacagcaataagaccactgtagctttgaatggtgctgttcactaattattacctccccacccattttctcatctgaccctcacagcagccccatgaggtcgacagggtgaggacattatccccatatcacagatgggaaaactgcagcccagggagctatgcgatttctcccgaggtcctcctcacactagtgtagtggagccgctatgtttattgaccccaaatccaagtcaacccaacagtctctagaacgttccaattacctggccagtcctcacttagataacatcggactctttcagaaaagattaaacaaatcctctatttgttgacagaggttttgctgaactggccctggggatccgaattgatcatggccatcaacacaggcagcaaagacccttcagaagtgttttattcactagccacctccatcccccaaccctccatcgtctaaagtgtctcctgactcagttctgtccccctgcttgtcctcttctcctattagctctgggtacccagtccagatcatagccccaagctctgtcatcattttgcagcctccagcctcccccacccaactcagcagagccctgagaagaaagtcctgggtcccggaggctgcacctgcagacacaacagattctgcaatggtgagagcatatagggtattttgggtctccagtggggtttttgctgattctgtgcctgaccagggcacatgcttcctggaattaataattctagataaagaagcctagcagatgcccacctatggaaaatgcttcttaaacaagaagaatctcagaattaggaggccagcttcttgttctcagcactgcccctaactagctgtggggcctcggacacgtcacttgatgcctctggtcctgttttcttctgtacattatggaggatttggacagagatgatcagtaaggtcccttctagccagactgtcaaggttcaaatcctagctctgccacattccagctgtgtgatcttggacaagttactttatctttcctaagcctcagtatccccaactataaaatgggcacaatagcacctatctcatatggctgttgtgaggacccaaagatacaatgaatgtcagccctcagcacagggcctggcacagagacagtactcagctaagtaactgtttctaagttgtttatgatttgaagctaaggatagagatgcttattctgagaagcagaaaggaacagatggagaaggaaaaaggaagatgggacaaaaggagaaaaactggccaggtgcggtggctcacacctgtaatcctagcactttgggaggccgaggctggcggattgcctgaagtcaggagttcgagaccagcctgggtaatatggtgaagccctgtctctactaaaaatgcaaaacttagctgggcatagtggtggacacctgtaatcccaactactcaggaggctgaggcaggagaatagcttgaacccaggaggtggcagttgcagtgagccgagatcgcaccactgcactccagcctgggcgacagagtgacactccatctcaaaaaaaaaaaaaaaaaaaaaaaggagaaaaattagggaaaatagggcaaaattgggggtggagaaaggcaggaaaaatttgagggcagcaactgcaataacttcaacagaaaagtagaacaataagcatacagccccaaaatactcagcccctttcctgcctccccttcctctctgcccctagcagacgccatgatagctcctggaatgatgccttttataactgtggggcatgttcctccaggctgacaccttctgggggggcccctgaacacagcatgggctcagccttcctcccacacacctaccctggtaggcatccctttgagatggatctgagtggtttcccacctccttctaggggtgaactgtcagttcaagaaggaggtttagggggatgggatgtcccctacctggggctaatgggggcttgggaggtggcttacgaatcgaagccgaagacagcagcctacgtgaccagaaaggaaaattcccctccctgctagttaagaagcttcacagaagctcaccagactgttgttttctttctttcttctttttttcctttgtgcacacataagcgtctaaattttgcaaactgttgcctacctttgtctctgagagcagtggaaaatattggactaacaaaaataagcaacagccagtgggagaataatagagaggcaaggtctcctggtctagttggcgccgcaggggttaagcctttctgtcggtgaaacaggctaacagcaccccctgagcctgctgacctcttccggctctcctggtccttcacacatgtcaactgtgagcacgctccaatactgacaagactgtcttacacctgaggcaattttcatagcacaggctgctaatttttcctccaggttttttgtttgtttgtttttttgcctggtaaaatacacataacataaaatttaccctcttagccatgtttaagcgcacagttgagtgatgtcaagtacattcatattgttgcgcaaccatcaccaccatccgtctctagaattcttttcattttgcgaaactgaaactctgtacccatgaaaccataactccccattcccgcctcctcccagcccctgacaaccactattctactttttgtctctatgattttaactactttaagtaactcatataagtgaaatcataccatatttgtctttctgtgtctggcttatttcacttagcctaatgccctcaactttcatccatgtggtagcatgtgtctgaatttccttccttttcaaggccaaataatattccactgtatgcatctgccgcattttgctcatccatccatctgtcaatgagtgcttggttgcgtccaccttttagtgattgtgaacagtgctgctataaacatgggtgcacaaatatctcttaaagaccctgctttcaattcttttgggtatagaaccagaagtagaattgctagaccatatgatagttctattttttttttttttgagatggagtttcgctcttgttgcccaggctggagtgcaatggcatgatcttggctcactgcaacctcccttcctggcttcaagcaattctcttgcctcagcctcccgagtagctgggattacaggcatgggccaccatgtccggctaattttgtatttttagtagagacagggtttctccatgttggtcaggctggtctcgaactcccgacctcaggtgatccactcgccttggcctcccaaagtgctgggattacaggcatgagccactgcgcccggccagtagttctatttttaactttctgaggaaccaccaaaccgttttccacaacagctgtaccattttacctttccgcccacagtgcacggcattccttctccacatcctcaccaacacttgtgattttctgttttttaaacaagtagccattccaacgagtaaagggtgatataaattttttaagaggcaagacgtgccaaaactaggatttcaaaaattgtaaatatagaataaaatagactattttaaatgtgacaaattaacaaattaattttagcctgcttatatgagttctttcaaagataatttctttttatttattattattattattatttattattattttgagacagagtcttgctctgtcaacccagactggaatgtagtggtgtgatctcagctcactgcaatctcggcctcccatgttcaaacagttctcctgcccatgttcaaacgattctcctgcttcagcgtcctgagtagctggaattataggcacccaccaccccaccaggctaatttttgtatttttagtagagacgaaggctggtctcgaattcctgacctcaagtgatctgcccgtctcagcctcccaaagggctgggattacaggcgtgagtcactgtacccgaccttcaaaaataatttttttttcttttttgagacggagactcgctcttgttgcccaggctggagtgcagtggcgcgatctcggctcgctgcaacctccgcctcgcaggttcaagggattctcctgcctcagcctccggagtagctgggactacaggcgtgcgccaccaagcccagctaatttttgtatttttagtagagatggggtttcaccatgttggccaggatggtctcaaactcctgacctcgtgatccacccaactcggcctcccaaagtgctgggcttacaggcgtgagccaccgcgcccggcctcaaatataatttctaaaggaagaaagagatagagaggggaagatagaaagaatgagagaagaaaaattaagaaagatgaggtcagatgacggggaaggtggagaagctttgcaggcagagtctggaatactgcttttggaaatgtgaggccaggccccgtgccttccaaatgcacccgatctttccgccgccgtaggtcccggatatatggatttgcttggggacattgcttgctttcacagggaggctgtgtactagcaaggacacaaagatgagcgctccacagttccctatttgggccagaaggtcaaaaaaaggggtggggtggtgggggggcacaggcagctaaactggctctgcctcctggggccaaaaggccagcttcctccctgggcctggctgcccagaaacctcggcgcgggcacaggtcagaggccgaactgggtggtattcaatcttgggtttaatgcattttaaaaactgcttttgaaggcgcaaatgcatcacagttctttcatttcagggaaaccgcctgtgagaaagggggaggtggggaaaacgctgagcccaggagggggctgccctgggcttttgtctaacaaagccgcagctcctcagcagcggggctcttgccctttgaaaaccaatcgggcaggaacccttcagcctcctttctgagagccagtcacatcacattttacagatctcagaaaagtgagccaagtccctgcgctatgtcactctgggtttgcgtcccatgtctctgacaccctgtttttctgagcaaacagcctctaggtgaacaacagtattttgcttctctcatcactgaatagggtcaaacttcccatggaattccactaccaaaccagatgaatagaaagaaagctgagagaccactaaatagggcattgctgctatctcaatgagagtgtcacctacccacaaagcaggcaggaaatctttaattaaccctgtttctagacacaaaagccctcaataacatttcatcctatttaaataaatattttcaaagaaggtgatgtgggaacacttttatttttgctattggagtgctaatttaatatcatatatagtttaaattatcatataagaacctataagcagagtttggggtggggaaggggggttggatccttctaggaactctcctttatctctttcatttttattccactgtgacacttccctcttgggaaattcctgccccggatttttattagtcttttgtctgctgtccggtgttaaaacctcacaaatccattacgtgcttctcggcgctgcctttcaagttacctctccacgaggtgtggactaatgaatcaaacggcaagggaagcagctgccctcagccctctcagaagaggcccggcccacagccatccttcagaaaaccctcctggcaggccctccctgggctcagcacaccctcgcttccctgggtttttattcggagctgtctgagctacaagaacatactcacgtacgtgacataaaaacacgcacgcacatgcagaaagggaaatacttgttgggctccatcagagagaatatttttcaaaaatctctcaatattgtcattatgtcaactgctaaagattccctgcttgacaaaaacttaatcaggcttccaaactttctcctaggcccatctgtgtactttcttgcaaaatccaggtttagcaaagaactctgcccagttagttgagcacaaccatcaaccttcaatatccggttcccctcagtgtctgatcagggtcctcatcccactccatcccccaggtgaggtctgatccccctggcctgtgttcagctagagtcctgttaggttggtttagccagaatccctctcactctttttgggaattttctatccattgaccccctactctgctccttggcataaatgcccacttgctgtacttggagttgagcccaatctttctgtcccactgcaagaccccattgcaatcatccttctacctatcatgacagttttgaatgaagtctgccttactgtgctttaacaggtatcattgaattatttttctttaacacatcttagcagtaaaattatcttcaaaattttcttagaatgtatgatcatcatctcttatagctgtatcctgatttccactttacaatagagtgctcatattatcatctcatttgtgcctttaacaaaccttttggggtaacaattgttatttccatgtgatagctggagaaactgagtttgaatgagttcctcaggggaacacagctagaaagtagtattgtggggctggcacacagtggctcatgcttgcaatcccagccctttgggggccgagtggggaagactgcttgaggccatgagttcaatactgacctgggcaacatagtgagacccccatctctacaaaaaaaattctaaaaataaattagtcagatgtggtggtagatacttgtaatcccagctactcaggaggctgaggcagaaggattgattgagcccaggaatttgaggccacagtgcacagtgatcgtgtgccactgcactccagcctggacaacacagtgagaccctgtctcgaaaaaaacaaggtagtgtggtgggagtaggacccacacttctcactgctagcctggtactcattctttttgataatgctgttgtgtcatgaaatggcactcaattagtgttgttggaatggtgggttgtgcctgcctcatagactgagatcggagcctactttggtcagtgcctccagtaaggttatgcggtttaagcattggatggaggtgccaggctgaggctgccagtgggtcctgggacttgcctgtacctgctccctggcagtgtgggtccagggatgcccacctggaggaaggggcatcagctggcctgaacctgcctgccatggagctgccttttctttcttcgttttttcttttgtttgttttagatggaatctcactctatctctcaggctggagtgcagtggcacgatctcggctcactgcaacctccacctcccgaattcaagcgattctctgcctgaacctcccaagtagctgggattacaggcgcccaccaccatgcctggctaatttttgtatttttagtagagatggggttgcaccatcttggccaggctggtcttgaactcctgaccccgtgatccacacacctcggcctcccaaagtgctggaattatagatgtgaaccatcacacccggccgttttcttcctttttttttttttgaaatggagtcttgctctgtcacccaggctggagtgcagtggcatgatctcgactcactgcaacctccatctctggggttcaagtgattctcctgcctcagcctcccaagtagctgggattacaggcaccctccaccacgcctggctaatttttgtgtttttagtagagacggggttgcaccatcttggccagactggtcttgaactcctgacctcaggtgatccacccacctcggtcttccaaagtgctgggattacataggcacgagccaccatgcccacccagagctgccatttctaactcacacagaggtatcagagcagcttgcagtggcccgcataagtggccagagctctttcctgggggttgcagggggtttctctgctgacccctcagcaggcagcaagccccataagccagagtgaaaggatgtggtagcagaaactggcctctgaagcgtgggaaacagatctgcttgccgtcagtggcatgcctgccaaatcatgctatccgcaaactcgaggcgggccctggaccggcggctgggcctgaggtcatctgggctttagtgctagttctgctgctgacactctttggttttatttttttcagtttacaaagtattttcacataaacagtctcagctgatcttcacaacaacactccgaaattgtccagtccctcgattttgctccagtgctctgagaggttaagtgacctgctcatgtcccgcagcacttcctctccctccgaggccagggcactttccccagagttgcctctctctggctgtggtgattcgggcaggtcctgtgtcccttctgaatttgacttctcatttgacaaccgagggggctggtgcaagaaccaaaccagtttcttgatcttgtgatgaaaacatgttttctttccactcacttttccatgttgctaatttctttggcctgacaatgcctgttctcttgctgtcttgagagcagcagagctgaggccacctgcccctcggagcatggtggtgtgtccttgcaggggtcagagtggtgtgtggatggcagtgggggccgtggaaggaggcttctggaaggcggcccacaatgactcttaaccctcccctccccagcctccagtcgttttctttcagttaattacctggttgttcaaccttcttggcagctccatagtttctttccccacccccaacatccacagccctcttggtctcagagctc
